United States Patent Application Publication US 2023/0172999 A1 - sequence listing, part 3

SEQ ID NO: 5 - protein, 1127650 aa, Roseburia hominis (residues 1-375,884 of 1,127,650)
  misc_feature (206027)..(206030): Xaa can be any naturally occurring amino acid
  misc_feature (267748)..(267751): Xaa can be any naturally occurring amino acid
  misc_feature (308138)..(308205): Xaa can be any naturally occurring amino acid
  misc_feature (435301)..(435353): Xaa can be any naturally occurring amino acid
  misc_feature (550632)..(550635): Xaa can be any naturally occurring amino acid
  misc_feature (643397)..(643400): Xaa can be any naturally occurring amino acid
  misc_feature (646104)..(646160): Xaa can be any naturally occurring amino acid
  misc_feature (694148)..(694210): Xaa can be any naturally occurring amino acid
  misc_feature (735460)..(735516): Xaa can be any naturally occurring amino acid
  misc_feature (749571)..(749574): Xaa can be any naturally occurring amino acid
  misc_feature (857718)..(857721): Xaa can be any naturally occurring amino acid
  misc_feature (861866)..(861921): Xaa can be any naturally occurring amino acid
  misc_feature (899281)..(899284): Xaa can be any naturally occurring amino acid
  misc_feature (1126885)..(1126888): Xaa can be any naturally occurring amino acid
MKELPLETETTVETVVLLSHKKADSYIHIDVEFGEGEGKIPVDSIAKRAEAYKPKEKVTYKMIKEYIEAKYGFKVHTAYIAEVKRNLGLPMYDAPNAVEELKQPRKHPTPEKVEAIKDALRYFAVIMNTQIIAIANQKGGVGKTTTCANLGIGLAQAGKKVLLIDGDPQGSLTISLGNPQPDKLPFTLSDAMGKILMDQPIRTGEGILHHAEGVDLMPADIQLSGMEVSLVNAMSRETILRQYLDTLKGQYSHILIDCQPSLGMLTVNALAAANRIIIPVQAEYLPAKGLEQLLSTVNKVKRQINPKLQIDGILLTMVDSRTNFAKEISALLRETYGSKIKVFGTEIPHSVRAKEISAEGKSIFAHDPGGKVAEGYKNLTKEVLKLEKQREKNRAGLGRMKSSAKKIELASVDDLFSTEEGRQDAKLEKIQEIPLSELHPFKNHPFKVKDDEAMMETADSIKQYGVLVPAIARPDPEGGYELVAGHRRHRASELAEKETMPVIVRDLDDDAATIIMVDSNLQRESLLPSERAFAYKMKLEAMKHQGERVDLTSSQVGTKLRADEILAQQAGSSRNQVQRYIRLTELIPELMDMVDEKKIALNPAYELSFLKKEEQVDLLDAMDSEQATPSLSQAQRLKKYSQEGYLTLDMMRVIMGEEKKSDLDRVTFTSDTLRKYFPKSYTPQRMQETIIKLLEAWQKKRQRDQERMRDISARELKGHNILAVERFWDNTRWMIEFSVLRPSTAYGSPGDEMRLFLTEDGYQTALQSQQRKEIKIKRYARVIEGHILDFKPGKRRRSMCTVKEIQEAIREDCRSQHDMDSTDIDRVMQTLPFAQEEPFTGARPQKPLFWFYARKFEKRMAVFRIERTRDYTVMSNHHLRNANLSLKAKGLLSMMLSLPEDWNYTTRGLAKICKEGVDAIGAALRELEGAGYIVRHQRRDKSGRITDTEYVIYEQPQPDLSQPDTASPDTENPDMVKPDTEKPAELNIEKSNTEKSITYGSSTDSIPFRETAAAGPPERKGRDAMSVTEIENYRELILENIEYDYLCREFATYREDLDEIVELMVETVCARRKTTRIAGSDFPHEVVRSRFLKLDSEHIRFVMDSLQKNTTEVRNMKQYLLTVLFNAPTTISNHYTSQVNHDMNADGWMNQMEIFKNPEFGSIRVIEENGKYLFSGTDVAAALGYSNPRDAIIRHCRYVVKRDAPHPQSPDRKISMTFIPEGDLYRLIVHSKLPSAEQFERWVFDEVLPTIRKHGAYLTKEKLWEIATSPEALMKLCSDLLAEREANISLRKENAQLEGKAAFYDLFIDLKHSTNLRTTAKELDVPERRFVRFLIERRFVYRTASGNVLPYANVKNTGLFCVKDYCNHGHIGSYTLVTPQGKLYFAQLREMILLVSMQEGKTIGQLMEEMRQKAGAQNYHGHDYMDLQRFAENTRHMIIFDVLTHDSPVGWKGERTRLFLSDIGYEKALDSQAKGQIKILSHAKVCQGNLHYDRTDQLRMQEEVENRTLTLVVSGTKFTGRMFKAAISKYMAHRKEKKLQKQRSRDAPVIPHGKQTVKQLVGQNQGISNIEITDPSIKEFEKIARKYGVDYAVKKDRSSSPPKYLIFFKGRDADALTAAFTEYTNKKVKKATKTERPSVLAKLNQFKEMVKNAVVDRTKRKELERMKKQFDIKKLVLLNLPYLLMGLFATNFGEAWRLAQGANASEKFLSLFAVLPGALQSFWPSLHPLDLLVGLCCGAGLRLAVYLKSKNAKKYRHGMEYGSARWGTHVDIAPYIDPVFQNNVILTKTESLTMNSRPKDPKTARNKNVLVIGGSGSGKTRFWLKPNLMQMHSSYVVTDPKGTILVECGKMLQRGAPKLGKDGKPMKDKRGKVIYEPYRIKVLNTINFKKSMHYNPFAYLHSEKDILKLVTTLIANTKGEGKAGDDFWVKAETLLYCALIGYIHYEAPVEEQNFSTLIEFINAMEVREDDEEFKNPVDLMFDALEAEKPNHFAVRQYKKYKLAAGKTAKSILISCGARLAVFDIAELREVTAYDELELDTLGDRKTALFLIMSDTDDSFNFLISMCYTQLFNLLCEKADDVYGGRLPVHVRCLIDECANIGQIPKLEKLVATIRSREISACLVLQAQSQLKAIYKDNADTIIGNMDTSIFLGGKEPTTLKELAAVLGKETIDTYNTGESRGRETSHSLNYQKLGKELMSQDELATMDGNKCILQLRGVRPFLSDKYDITKHPNFKYTADADDKNAFDIEAFLSARLKLKPNEVCDVYEVDTKGAMAYKADNRKKNNEKGGQPESCPRKPGGRLFRLLYAYETMAFFEQAITVLQTLVIALGAGLGIWGVINLLEGYGNDNPGAKSQGMKQLMAGAGVAVVGMVLVPLLSGLFSVMDFLLEALTNWLKEMLVGGIMSNLSGMFDSVNQQVADISVQVGQTPQGWNGSIFSMIENLSNSIMVPIAGVILAIVMTVDLIQMIADKNNLHDVDTWMIFKWVFKSAAAILIVTNTWNIVMGVFDMAQSVVAQAAGIINSDASIDISSVMTDLEPRLMEMDLGPLFGLWFQSLFIGITMWALYICIFIVIYGRMIEIYLVTSVAPVPMAAMMGKEWGGMGQNYLRSLLALGFQAFLIIVCVAIYAVLVQNIALEDDIIMAIWSCVGYTVLLCFTLFKTGSLAKSVFQAHMTLFTAMKSWLRRLLGKPEEKTVQPVKTKKKLSRADKKQIEAAIARANRTDKKGKSAQDSIPYERMWPDGICRVSDNHYTKTIQFQDINYQLSQNEDKTAIFEGWCDFLNYFDSSIHFQLSFLNLAASEETFANSISIPPQGDDFDSIREEYTTMLQNQLARGNNGLIKTKYLTFGIDADSIKAAKPRLERIETDILNNFKRLGVAARTLDGKERLSQLHAVFHMDEQLPFQFEWDWLAPSGLSTKDFIAPSSFEFRTGKQFRMGKKYGAVSFLQILAPELNDRLLADFLDMESSLIVSMHIQSVDQVKAIKTVKRKITDLDRSKIEEQKKAVRAGYDMDIIPSDLATYGSEAKKLLQDLQSRNERMFLVSFLVLNTADNPRQLGNNIFQAGSIAQKYNCQLTRLDFQQEEGLMSCLPLGLNQIEIQRGLTTSSTAIFVPFTTQELFQNGKEALYYGINALSNNLIMVDRKLLKNPNGLILGTPGSGKSFSAKREIANCFLLTNDDVIICDPEAEYAPLVERLHGQVIKISPTSSNYINPMDLNLDYSDDESPLSLKSDFILSLCELIVGGKDGLQPVQKTIIDRCVRLVYQTYLNDPRPENMPILEDLYNLLRSQEEKEAQYIATALEIYVTGSLNVFNHQSNVDINNRIVCYDIKELGKQLKKIGMLVVQDQVWNRVTINRAAHKSTRYYIDEMHLLLKEEQTAAYTVEIWKRFRKWGGIPTGITQNVKDLLSSREVENIFENSDFVYMLNQAGGDRQILAKQLGISTHQLSYVTHSGEGEGLLFYGSTILPFVDHFPKNTELYRIMTTKPQELKKEDEMMNPNILNKNPLMFFDRAVNAQRSQLLTVMADAVSECRTAADQAAELNETGQVGLLRLAEVWSAIRAKEGMGGLILEGTEAKILSDVVAQFYAYLSGCMFNDPVGMAIYAELHYMMSSLMLGEWFEMNKEPRLRFTDEERSDPALEKPIRKAEKAAARADKAQANIPKKKVRQTVIDPDTGKKTSKLTFEDKKKPPSKVSQGVREAPVHLVAGKLHKEIRETEQDNVGVESAHKSEEAVETGAYLVREGYRSHKLKPYRKAAQAERQLEKANVNVLYQKSLQENPQFASNPLSRWQQKQAIKKQYAAAKHAGQTAGNTAQAASKTGKAARTVKEKVQQAGAFVMRHKKGFLMAGVLFLITCMLMNTMSSCSMMAQSIGSVLSGTTYPSDDPEMLAVEADYAAREAQLQEEIDNIESSHPGYDEYRYDLAMIGHDPHELAAFLSAVLQGYTRQSAQAELARVFAAQYQLTLTEEVEIRYRTETSTDPETGETTSEEVPYEYYILNVKLASKPISAVASELLTPEQMEMYQVYRQTMGNKPLLFGGGSPDTSGSEDLSGVQFINGTRPGNPQLVELAKRQVGNVGGYPYWSWYGFDSRVEWCACFVSWCYNQAGKSEPRFAGCEWQGVPWFQSHGQWGARGYNNLAPGDAIFFDWDLDGTADHVGIVIGTDGSRVYTVEGNSGDACKIKSYDLNYQSIKGYGLMNWMAKNKIERIDQEIEKTREKIAEYQEKLKTLEAQKTEAENLEIVQMVRALRMTPAQLNAMLSGGMNHGRDTALSESNNQEVTAYEEMKNKRICKTLSALCLTMVVAFGFTIPAFAQGSEQAPAAPAEDSTNDSNVIVEETEPAPALTPEGNAALVDDFGGNKQLITVTTKAGNYFYILIDRANEDKETAVHFLNQVDDADLAALMEDGKPKEEMPAVCSCSTKCEAGAVNTACPVCATDKSKCTGKAPEPPAETPEPEKEKPAGLNPAALVLLLALLGGGGVFAYLKLVKNKPKTKGNDSLDDYDYGEEDSEEWETEDEESGEPDADGGSTEEDDEDSVKMSVLIIFIKLIAVFDLLVIAVYFGGDILSTVLNKLRRKPKQEDSFDFSLDAATVPLSIDSIRQLYSGDAADFVEEKILPNAEKTMAVLTEQEQTAARLLLSALIGFLAAEAPMDEQSFPLMMELLNCMEGEKEDGCQDAVDSLLEDAACNTRRHEEYYSNYQRYQLMQVDKTRVILACRIIINDLLGKLYRYDYRFGYNLLLDEENSIEKKLHTPVREEWEAEDDEIMMRYKLVIAEKPSVAQSLAAVIGATARKDGYLDGNGWRVSWCVGHLAGLADADSYDPKYAKWRYDDLPILPEHWQMVVGKDKKKQFDILKKLMNAPDVTEVVNACDAGREGELIFRSVYELAGCQKPMKRLWISSMEDSAIREGFANLRPGADYDGLRDAALCRAKADWLVGINATRLFSVLYHRTLNIGRVMSPTLALIVQREAEIDTFQPVPFYTVALELPGLTVSGERMADKAAAEQLKEACQGANVTIKKVERKEKSEKPPALYDLTTLQRDANRLLGFTAQQTLDYLQSLYEKKLCTYPRTDSRYLTGDMADSLPVLVNLVANAMPFRKGIAISCDAGAVINDKKVTDHHAVIPTRNLKDADLSALPAGEKAVLELVALRLLCAVAQPHIYSETVVIAACAGGKFTAKGKTVKHPGWKALEDAYRAKTKDAEPKKEGAEKALPELTEGQTLSVSAAIVKEGKSSPPQHFTEDTLLSAMETAGKEDMPEDAERKGLGTPATRAGILEKLVSAGFLERKKSRKTVQLLPSHDAVSLITVLPEQLQSPLLTAEWEYRLGEIERGQLAPEEFLDGISTMLKDLVGTYQVIKGTEYLFTPPREVVGKCPRCGGEVAELQKGFFCQNDSCKFAIWKNNKWWAAKKKQPTKAVVSALLNDGRVRVTGLYSEKTGKTYDAAVVLEDDGQYANFKLEFDQRKGGSRMKLSLVERETILLYNQAEPMAEIYTHDPRLMEKLDLLAKKHPDQITRKDAHNFTVPKRCVSVREPYSAERRKAASERAKAAGYQPPMRKSDSMTENVFEAVKQSVSTRDAAAFYGIEVKRNGMACCPFHDDKNPSMKVDQRFHCFGCGEDGDVIDFTAKLFDLSSKEAAEKLAQDFGLIYDSQAPPRRRYVRQKTEAQKFREDRQRCYRVLSDYYYLLKKWEADNSPRTLEEEPHPRFVEAIQKKTYVEYLLDLFLYESEEEQRAWIAEHTAEITHLERRLKIMAENKPTNRERLREITDGIEQGIKELFESEKYMRYLSVMSRFHRYSVNNTMLIYMQKPDATLVAGYNKWKDQFERHVKKGEHGITIIAPTPYKKKIEEQKLDPDTKAPILDKDGKIVTEEKEIEIPMFRPVKVFDVSQTDGKPLPELASSLSGNVPNYEAFMEALRRSAPVPITFESMAADTDGYFSADHQKIAIRQGMSEVQTVSATVHEIAHSKLHDPKKYEMLPSWKVVQESEGGTKHDFKLDFATEKEAEQFASDMDWCYVDENQFEWRLAVEEDATAEKQAIKNRHTEEVEAESISYAVCKYFGIETGENSFGYIASWSQGKELKELRASLETINKTSGTLISDIERHYKEICKERGIDPHAKVEPEPALIEQPEDAAKVSDRQQTGDLTYYVAECMEFPNLGEYHDNLSLEEAIRIYQEIPAERMNGIKGIGFELKDGSDYEGPFPILTGQTIDLDTIQAIDYYRDNPLVQKAVKELAAAMPEMEVLGADANQQEALFLIDNATYLHIQSCDSGWDYTLYDAASMKELDGGQLDMPEISRMKAVLQICDDNDLGRDSVKYAPLSMIETLQDAAYQQMQAEVSQMAASSQLPEAQEQALDEYPMPDEQVSTPDMQEYGYSYDGMFPVTRERALELDAAGLTVYVLHEDNTESMVFDPQEIMDHGGLFGVDREEWEKSPQFHEKVMERQEHQQEREQAFLSQNRDCFAIYQVSRDDPQNVRFMNLDWLKSHDISIDRSNYDLIYTAPLRESGTVPEQLEKLYEQFNLQKPADFHSPSMSVSDIVAIKQDGKVSCHYCDSVGFTQIPGFLPENPLKNAEMAVEDDYGMIDGIINNGAKEPTVAELEQQARNGQPISLMDLATAAHREEREKKKSVMEQLKSQPKAEHKKIAPKKSAEREIMGNFTFEEMNLMCIYNTGSRTGLIDSLREMRGELAPEETELRELTDSALGKLQAMRDAEFAELELYPDFDQMGLFILLAPFLVGFALCISDGNADLPQHLLVDLADRCSQRPDGGRGVEIKDRHEIFVVEVAFRLQSTAGHQSVSDTDGGCCLELYSDVKLIIFLQKGTVNDIEEVLLMLRPVFLSQFSGYIGELSGKVITGNIIGALKHGLHRIQMALLQLPQPGSAGMFTGSSVGNIKNIAQAGPVPGIVHQSNSLGAAPYIPAHLFIPQIVLCTGGGVRTLGVDHQLLMERVLVKAGSSGEKPCPFLPAPRELRCYLLRHLCIMNNPMTYIQNGDYQIPDLELSQQPEKPLGKYGRMRKTYLKEHRPILYNQMLMSEKLYPHLIEIDETAQSRLEQMMPQLAKEAGATEELKASDPMKWVGLMNTCKAQAEEILMAELINSMVAAFEKQKTTAEIAEILKTLYHGGNGLGSVSAWYAEDGIHLSHGKSVRYDRSAQVISWERAAERIGELLESGQFASNVELAEAAGYERSLLSEKLWHLYHDLSEDARKAGYLSCLSEIKGNGFPEETRRLTEQLSDPAFRQTLKEEYAAFWTAYQQDRDLLRFHYHRPREIWENLKDLDLPRRTFSSELSQVPTVQHFITEDEIDTAMTGGSSFAGGKGRIYAFFMENHTDKEKVRFLKDEYGIGGRSHALSGATHSGEDHDGKGLHYKKQDCPDVHLNWEKVSKRITSLVQKGRYLTEQEQAQYDKIQAEKDLAEEDAIQAQQPEIEEETPKPTLREQFEQYKPVVTAAISEDVAYRNACGHSDRENAVIEGNAAVRRAVLGSKDMELIRLYSDVPEFRQRLHREVIDETYPKLHELLRPLSQEDIDTALCAWNGNIESKHAVVRYMKDHAREKDTAAWLAQEYGGSNSPFVVRAGSPEETQLPWPKVQRRLAQLIQEDRFYTEEEQDRFDNIDPIAIREALEERGIVNGQVADPEKLDNDSFIQQVMSDVEQIAAVETEQTSEVAISDEEYDAVRRPIPQRISYDPAAPVYAVGDTVYIEDDAYQITELRDDTVQLLPTGMVYPIYRAERKEQFEQLLRADRRNAYYTEFLPIDPDKADQDLRDVLSHGLMDEADKKQISTLLQSGRSNSEIAYWLSRAYSGEIETLNLETGDIADYRTTAQGIELEVMDAEEKRLAMLYFRWDEVAPLLRGMYARQQDGLGQEQSQPAAESPTFHSETMAVYPGDKNNLPYDVVVERLHIEEPEPPAPVTEPEKTFEEVLDEHPVSIQVNGQWQTFPNAKAAEEASYEEYKANLRRNAKNFRITDEHLGEGGPKAKFQANVNAIRLLKELEAAGQQASPEQQEVLSRYVGWGGLSDAFDPEKPAWASEYAQLKELLTTEEYAAARSSTLNAHYTSPTVIQAIYEAVDRMGFETGNILEPSMGVGNFFGMLPEKMRNSRLYGVELDPVSGRIAKQLYPKADITVGGFETTDRRDFFDLAIGNVPFGQYQVNDKAYNKLNFSIHNYFFAKALDQVRPGGVVAFVTSRYTMDAKDSTVRRYLAQRAELLGAIRLPNDAFKKNAGAEVVSDIIFLQKRDRPLDIVPEWTQTGQTEDGFAINRYFIDHPEMVLGRQEPVSTAHGMDYTVNPIEGLKLSDQLHDAGKYIHGTYQEAELPELGEGEAIDTSIPADPNVKNYSYAIVDGQVYYRENSRMVRPDLNATAEARVKGLVGLRDCVQELIDLQMDASVPDSTIREKQTELNSLYDSFSSKYGLINDRANRLAYADDSSYYLLCALEVIDEDGKLERKADMFTKRTIKPHQAVAVVDTASEALAVSISEKACVDMDYMSQLTGKTKEALAGELQGVIFRVPGQLEQDGTPHYVTADEYLSGNVRRKLRQAQRAAQQDLSFAVNVEALTAAQPKDLDASEIEVRLGATWIDKEYIQQFMYETFNTPFYLQRSIGVNYSSFTAEWQIKGKSSVSYNDVAAYTTYGTSRANAYKILEDSLNLRDVRIYDTIEDADGKERRVLNAKETTLAAQKQQAIREAFRDWIWRDPERRQTLVRQYNEEMNSTRPREYDGSHITFGGMNPAITLREHQKSAIAHVLYGGNTLLAHEVGAGKTFEMVAAAMEAKRLGLCQKSLFVVPNHLTEQWASEFLRLYPSANILVTTKKDFETHNRKKFCARIATGDYDAIIMGHSQFERIPISRERQERLLYEQIDEITEGIAEVQASGGERFTVKQLERTRKSLEARLEKLQAEGRKDDVVTFEQLGVDRLFVDEAHNYKNLFLYTKMRNVAGLSTSDAQKSSDMFAKCRYMDEITGNRGVIFATGTPVSNSMTELYTMQRYLQYERLQELNMTHFDCWASRFGETVTALELAPEGTGYRARTRFSKFFNLPELMNLFKEVADIKTADQLNLPTPEVEYHNIVAQPTEHQQEMVKALSERASLVHSGTVDPSQDNMLKITSDGRKLGLDQRIVNQMLPDEPGTKVNQCVDNIMQIWRDGKADKLTQLVFCDISTPQAKAPVSKAAKTLDNPLLHALEGAVPLPEQEPVFTVYDDIRQKLIAQGMPADQIAFIHEANTEVRKKELFSKVCTGQVRVLLGSTAKMGAGTNVQDRLVALHDLDCPWRPGDLAQRKGRIERQGNQNPLVHVYRYVTEGTFDAYLWQTVENKQKFISQIMTSKSPVRSCDDVDETALSFAEIKALCAGDPRIKERMDLDVEVSRLKLMKADHQSKQYRLEDQLLKYFPEEIEKHKGFIKGFESDLEVLAAHPHPEDGFAGMEIRGDLLTDKENAGAALLDACKEVKTSDPVQIGSYRGYAMSVEFSAWKQEYTLLLKGQMTHRATLGTDPRGNLTRIDNALAQMPQRLEAAKAQLDNLYQQQVAAKEEVGKPFLYEEELRSKNARLVELDTLLNIDGKGQAHTESVVAKSTRPSVLDNLKRPVQPRSTDKKPKQHEEVRMNTNDLNTALYEKMSDEQDKFRDWLKSQPPEEILHHTYEYTVREDIVMAMEQLELTDAQAQALLDSPSPLADVYRYFEKLETGYMDVIRDSIENRADDVCRAKEELRTTPVYPHSAAYAREHGELEQYRVSNNVNRQCKESIEAAVREHFDGMYLSHDAAKGVIETYGMERVALVLANTVQLQDWDGRYSRRNKEWAKTIPNDNPETVRCGYVLNSHPAVLDGFIDLVREEQQRSRTQGEKLQPSRPSVRDKLKQELPAHKPAAPKKREPERMSSQKRKRDVPVLFWVSAAEMEAIQKKMAQFGTKNLSAYLRKMAVDGYVVQLDLPELKELVSLLRRSSNNLNQLTRKVHETGRIYDADLEDISQRQEQLWDGIKEILTRLSKLSMRALVFLLKLLLKILAAPVILALTLFVWICVGIVYISGLVLGLISMVIALLGVAVLLSCSLQNGIILLVMAFLISPYGLPMAAIWLLGKVQDLKFAIQDLVYGMNVTKSERFEQLDRLLTEHDGMLQTAQVIASGIVKPIFYEYVKEKNLQQVAHGIYVSEDTWLDAMFLLHLRCGQAVFSHESALFFHDLTDREPSPYAITVRRGYSTTRLKAEGLSVYTIKPELYEVGLTTGQTPFGHTVPVYDMERTICDLLRSRNSMEIQTFQGALKMYARGKDKDLRTLMRYAGMFRVEKILRQYLEVLLMIKTARQLKDLIRNLSREKSADAQLLMRNYMMERFLERISLSEYRDKFILKGGMLVAAMVGLDARSTMDLDATVKGANVNVEDIENLISAIVSVPIDDGVKFQLKSISEIMDEAEYPGIRVSMTTTFDGVVTPLKIDISTGDAITPREVRYSFKLMLEDRSIDIWAYNLETVLAEKLETIITRTTTNTRMRDFYDIYILEQLHGNTLNPQILHDALWATSHKRGTERHLAEAAEVFEEVENSSVMQKLWESYRRKFSYAADLEWSIIMGAVRSLYALCEKGSSLMKKHGHYCKVCGEYKANEKFSGKGHAAHICKSCASLPPEKQAEQMTINRLLNLPWRLSKEQISWLKNRMKDKRPEVRALAKEQYEMRFPPKQLEDTDDDFDFLDENDFIEMATTRIMPLHIGKGRTESQAISDIIDYVANPQKTDNGKLITGYGCDSRTADAEFLLAKRQYIAATGRVRGTDDVIAYHVRQSFKPGEITPEEANRLGVEFAKRFTKGNHAFVVCTHIDKSHVHNHIIWSAVNTDCDRKFRNFWGSTRAVRRLSDTICIENGLSIVEDPKPHGKSYNKWLGEQAKPSHREQLRVMIDRALEQKPADFDALLKLLSEMGCEVSRRGKAIRLKAPGWKNVARMDDKLGAGYSEAEIRAVLAGEKQHIPRKKSIVQPEQPKVNLLVDIQAKLQAGKGAGYARWAKVFNLKQMAQTVNFLTEHQLLDYAELAEKAAAATAHHNELSAQIKAAEKRMAEIAVLRTHITNYAKTRETYVAYRKAGYSKKFREEHEEEILLHQAAKNAFDEMGVKKLPKVKDLQAEYAKLLEEKKKTYAEYRRSREEMRELLTAKANVDRLLKMDEEQKKEQEKDHGQRMHSYEKQALSGAIEILSQSELPDRFEGMKLYGFSEEAKDELRQDCKIFRLSNETGHGKITVYQVFPGIELYYNDMHMGYCNQNQATAKNMIEINHCLIGRFECSFGENSCCYMAEGDLSISSGMKKKSNSCFPLNHYHGISIIINLDELLPEVRRIMELLNIDLKYIQTYICEGNRCCIMRANPSIEHIFSELYHVREKRKPGYMKIKMLELLLFLSDLNTADEVLQMDYFNRNQVALIKEVASYITEDLTTHHTIEQLSQKFEISTTALKKCFRGVYGTSVYSYLRTYRLQVAQKLLLETELSVTDIASKIGYENPNKFTSAFKETYGSSPTEFRKSVRLDRNGSVWSGEEIMENEKSTGNKYTVKDAAIIGIFCAVMFVVFMVYSTLTGASLFYSMIFNAAGAALILAPFYVYMCMKVGKHGPALVYNIMWAIIAGLMMGPFMIPWFLGGGIIAELSMCGKGAYHDIKRVSISWVITALVRAAHGMSEIWFFKDAFLATGVSEQQVQVQTQYYTDPKYVILSLAVTAVLAILGCMISNKLIVKHFRKSGAIKMNMKFDFRTKLLVIVLTMSLVAVLTSDILIYTLLGVLSVYLIIQGFGRQTIKYLIVCGIFIVLRLLSGGQGITVLMPEMFLFMVLRILMMVMAAQPVIGMPPGEVVAVFKKIHAPDGIALPVTFMLRFFPTVRSEFSDVFASLRLRKLLSWKHPLDAMEYIVTPVIFRSSRIAEELAASAESRGISNPGKHTCRRKIEFQKRDWIMCAIAVCVTALYFVLERTVAMVNDEAKQSVIQFEDVSFEYPGAETESIQHINLDVKEGEFLVLTGGSGCGKTTLTRLINGLAEQFYEGTLKGRVTLLGRSISEYPLYEIGKKVGSIFQDPKSQFFASITEDEIAFGCENYGVSYEELDGRVSNAIKRINGDMLRGKEIYPMSSGEKQKIAVASVNAVDPEIYVFDEPSANLDMYSVEALKNLMRELKAEGHTIVVAEHRLYYLTDLADRFLYMENGSIKEEWSPEELLSMSENKRQKIGIRAADLRHIEVDIPPREDKNVTLEVKQLAFSYRKHPVFHDISFQVYAGDLIAIVGHNGIGKTTLSNILCGIQKEKTGQVLYNGQEISKGKRKNFAYFVMQNTDCQLFGDSVEEELLLNGKGSTQEQRDDLLKLYGLFEWKDKHPATLSGGQKQRLTLAVSDWIDTPVLLLDEPTSGLDFKNMMRISEHLKALAQKGKTILIITHDYEFAAMTCNRVLHFVDEGHAETFPLQGNLPRLYSCLMCQMEKQKNGELSRMFGYAGNYHVLTVLGCILSGISTILSMLPFVCIWLVIRDLIQAFAAGDISLATESTRYAWMAVVFAAASILIYFIALNCTHLAAFRTATNMRKTAIHHIVTLPLGYFSQNASGRLRKIIDDNAGLTEGFLAHQLPDLTGAVVMPVAVIVLIFLFDWRLGICCLIPMGISVIFLKQMMGGDNAQFMGKYMTALETMNKEAVEYIRGIPVVKVFQQTIYSFKNFHAAIEEYEKFASGYALKCRIPLTGFTVTLNGTFVLLIPVAMLILSGVSGQAAYENVVLDFLFYSLFTPVCATMMNRIMFASEQLMAAKSAVSRVEEILQEQPLKEPEHPMIPADASIVFSDVSFAYPGAKGNALNHISFEVPAGKTVALVGASGSGKSTAASLIPRFYDVQSGSVTIGGVDVRNIEKQELMKRVAFVFQNTRLFKDTLLNNIKAARPDATREEVLKAANEAQCKDIIDRLPDGLDTLVGTGGTYLSGGENQRIALARAILKDAPIIVLDEATAFADAENEHQIQLAFERLTKNKTVLMIAHRLSTIQDADLILVFKDGQIAERGTHEELVALNGIYSSMWKDYQTSIAWKVGKEGEQHDMIKALKNKYALSNQGAKDLLKGIIYSVLANISLMFPVILLAIVLNQLLAPILGMNAPEISAIVYTVIGIVILAVVFIFHYCQYTAAYLGTYDESARRRISLAEKLRTLPLTFFHQRDIADLTSTIMGDCANFEHAFSHTVPQFFGAVISTGIVCVGLLIFNWQMGLALLWVAPISFAIVLLSRKWQEKLSKKHMNARLELAEGIQECLETVQDIKACNQEEDYLRKLDAKMDAAEKAQISSEMTTASLLTTGQMFLRLGLATVIVVGNSLVVNGNATLFTYILFLIAASRLYDPLSGAMANMAELFSVQLQVNRLKEIEEYPEETGEKEIHTNGYDITFDHVRFSYEKDKPVLRDVSFTAKQGQVTALVGPSGGGKSTVAKLAAKFYPLDGGRILLGGTDIAPLNSTMLMKNFSIVFQDVVLFNNTIMENIRVGKKDATDEEVIAAAKAAQCDEFISKLPDGYQTVIGENGSTLSGGECQRLSIARALLKDAPVILLDEATASLDVDNETEIQNAISRLVKGKTVLIIAHRMRTVEAADNIVVLSDGMVVENGTHEKLMKENGLYRKLVDLQTASANWRLSVMKLHASGEDYLEAILVLHKKMGMVRSVDVARHMEVTKPSVCHAVNTLKDGGFLTMDEDHFLYLTDIGREVAEKIYERHCFFRDRLIAAGVDPKTAETDACRMEHNISMESFEKLRDYYSSQKGKMDKKVRHIDFSFGTSLRNAREKRNYKREQIAERAEISPRFLAAIESGRRKPSLDVLIRLVNAIGASFDEILAPQTNTDSEIVDRIRRLVPQCSQRDQELLLALIDKMLDTKENNANKMACLLVAGPLNEKNLAVKLRQNPKKTVSSLPVFYGLHRNYQMSKNREESTNYYLYIDGQAVPVSEQVYRVYQHYERKEEYFSYDLKTEKFQKDTAIFLPSREDSYERLLEKDKQFAASGQPVEEQAVSSVWLEELLQHLSSDERIILHKLYFEDKSERIVSMELGISKTALHQRKVKLLQKLKNFLENMGKAMFEKFHRGDIYSADLSPGIGSEQSGSRPVLILQNNVGNCFSPTIIIAAITSVSKKNRKFPTHYHLNDRCGLVKPSVVMLEQIRTIDKSRLKNYIGHLNKDDMENINKTLLCSLGITMENIQNKSALIPSDEIRSEELLAEQKFEAFITSLAHIIEKYGMRVLGEVDGAAMNRYGKRCVLYPRVSTEMQVDGYSLEGQKNMLTRFADREEMIIVDTYEDAGKSGKSIEGRPAFQKMLRDIEDGLDIDYILVYKLSRFGRNAADILNSLELVQSYGVNLICIEEGIDSSQTSGKLLISVLSAVAEIERENIIEQTMNGRREKARQGGWNGGFAPYGYTLEDNKLMIEETEAVAIRKIFELYTSSEIGLGGIANQLNLQGIRKIPRQNGTLEDWTGHFIKLILDNPVYCGKIAYGRRTKEKVKGTKNDYQMKRNDDYILTEGQHKGIVSEEVWEKAHAKRLRTGVKQPSKIGRDRVHLLSGLLKCPVCGSPMYTNKHAWTNKDGTYKEIYYYVCSRNRMVRGKHCEYKAMLKKTDIEPMVIEAIREIVRNEEYAQAIKKRIGVQIDTKAVDKELEGYQAKLKEVDLNKTRLEREIDSLPADAKYRERKLHDMTLRLDSLYDVIVELEEKIEDARLRRDAIKQQAITLENIYKIMVNFDCVYNIINDEEKRNVVTALIKEIEIYRNDESEYPLKRIGLNFPVFKDGGEVTELLWDKGNTVETVILLSRKTLDAVININLDMSELDLTSAESKATYAEIKKYVLDKFGLKVSQFYIAQVKREFGLIERINYNVGEGKNHVPQVTPEKREAIIDALKHFQMIEMNKKAYEICSKAKVSNDFARHEVPLVQLTDIQKDIEKMERYKKSLIYEYVTGKKRVKGVEMPKNVIKEKEDFQRYILDYLKNKNGYVVRDAKTCFNSHYAMDIELLFQFLNDTQADTMEKLEKIYKDKTKETIINYLNKEITKLDTHTKTPSIRQTAEKEEVIKDALKHFGIIMGFSKNDFEKVDLRIKKITEQTVEQIEVDSELPPTIEQLEDNNKTYSIMAAILFIDIRKSTYLTENSQAKSMVKIYRSFMRMAVDCVRKNGGVTRQFLGDRIMGVFIDSIDENGSMVDSAADKAINAARSLQTVIDYSLNKYLKTNVNGKVIECGIGIDYGKVLVTQVGMYGLESDENRENEVDCVWVGNTTNYASKYSDIASGGEIFISDNVFKQMSDEYREVFVKSAKYKGTKLFQGYVTKDYYLEFSEDLGKPIKIEEDTTVESDTFEGLADGIREIERLQDKLIQREKQLAVLEDKLKKENQDYRDKYKNENTAKLRAFDERNIAEEELQKIRKDYYIDIKNILSKVHYHEYQYMDKIGKKDLFSMIEKAYELGALIGKNSKEVSLELSCYLIGIYDYFQEYSKSFDVMLVMAELSDYWVDLESATLKWANKEKVLYKLYNEIERALVNYRVKYERRKDFEGYLQIIKKIRGYMEHDRKQIKENRAFKKEDAYETLGIINTWIGNMDTKVSFALALAGVLIGVIFEKGIPNAFERITEVSKLAELSGGEIIAAILVALLYLSSFISILCFMLSIIARVKNLNNASSAFFFGSIGNMTLENYKNAVKDMDEKEIVDDLEEQIHTNSKICSLKAKWYNKGIKFLLVTVILWFVCMIFQLIMESNHTMSYDVDKSSDRMDDILNASDNDYCDKDSIPARSDLTFKNGYYVNVTAIFIDIVGSSDMTDEHKRPTLAKMYRAFLSECVAIMNAEIDCKEININGDCVWGVFDTPYKSDIDNVISVAARLNSMIKILNYKLRKKNYSEISVGIGIDYGRALMVKAGYSGSGINDVIWMGDVVNSACHLCNKAGRDYRKVIVISDVVYNNLNEHKQGLFSSYSDGWVTRYEGDIINTSMNDWYNEHCKMSDKLYYRKHLIQISAGTAYETFVGEKCVYFFQPDDCIMKKKSSVIAKLIIPVAVLGCIAIMIAGVSLYSMTAVQKESNQISGEGVRATICMDEINLAFANTQKLTLALCAEPSKDLYEYVASQLTEYQSNVDSYEKELLAMDHYFTADDIQLMNETFDLLTEAQGTTVELMQTAMAGDSAAAVAKANSVMTEWSDTIAVNMDTLISRNDELVKQNIQEQKDLYNQNMILSLILLAISFVAFVMVVVVIIKTVVKPLRKQTSELTEIIDEIKGGHGDLTKRVTVKSMDEIGQSSIGINHFIETLQNIMSNIISNSNVLDGVVGNVASSVAASSDNANDISAIMEELSATMEEVSATTNSVSENTTAAEGKVQKMADQTKVMSQYAQDMKKRATELEHTATENMNSTNEMIGEITTEMNQALENSKSVEKVAQLTADILSISSQTNLLALNASIEAARAGEAGKGFAVVADEIRQLADSSRETANNIQTINEQVIEAVQGLVVSSEKIVGYINENILPDYRAFVQGGQQYNDDATHIDNTMAEYASEAQDILATMMEMTEAIEGISRAVEESANGVTDAATNIDFLVQSMSTVNGQMEENSTVAKNLKEESAAFACVMEEDRKKLTEKKLLSCGKREFLEKGYAKANLRSICEASGVTTGAFYFSFANKEALLRAILDPFIADSRELLSGLARMEEEHPETADDNEIQIIRYLSAHREECIILMEKSAGSCYEHFHEEAAAMMQESFRRYYRKYLGAEPDPELIRILASMRLHGYLELVHGDYTMKERLFLARAIGIHADAGTLSLIQYLKEENDAHRMNQKPNYGNWVPEKLLYLTFGGAALFLVLALLSGLAFSNTPLAVICAILCAVLLAFGIYMYACHECFAFGKGDMMAKVHAHLVAHLNWDGHGTLLDIGCGAAPLTIRCAKAFPDAALTGMDYWGAQWNYAKEQCEKNAAIEGVASRIHFEKGDAAHLNYADETFDAAVSNFVFHEVHSARDKRDVVRESLRVVKRGGAFSFQDLFAQKSLYGDMDAFVEELKKEGISEIHYIGNLEKTLDFVPAYVRTPWMISGMGILYGKKMGTKQYERIFQILGAVLLAAVVVGVIAVCFGNGARSGVKREIGASDYYSQEEIDAAMDTAQEYFDDHFPGCVMTAFWYDEESVREAESEYAEEYQADQAVILLSDFQTDKHGGDGSLNPNEIYQDWQWVLVRSGNGDWTLKTCGYMSLVFGLTVKILILMAVGFAGKKCGLIDEVCKEKLSGLLVNLLMPVCMLVSSQQTFRMERLRGAAVVALIAAVYYGVAFAVGMCVGKAAGFERKKRVIFTLLIAFANTGFVGLPVLTQLIGESGMLYGAIYNCVFDILYFSYGLYLLVGREGCGVRGLFSNVMIWVAVATVVIYMMPWRFPAVVTEALRMLGDTMMPVSMLIIGAEIAEMDLRTILTDRSAYGVSLLRMVVFPAVTLLVMRVLGVDYEVAATAVVLGAMPSGSLNVIMAQKYHTHPAFAATAVMQNTILMIVTLPLFLYLCERFCGGMKKVLICDYTNALEPNYEPTISSMSEALGEPVECLIRPYVSDEELVQELAGADGLITGFLEIGAEILAQVPELACISVSGVGYSNIDVAAAKRHHVAVCHIREYCTEEVAEHTFALIGALNRHLKYYTKRVEKEHEWKYQTIGGEKNLSGQTLAIFGLGKIGKRVAALAGAYGMKVLAVDPYADEKDAACRGVRLVSAGEAFAEADVITNHMNLTVENEHYFDERAFSNMQKNPIFINVGRGRCVDEAALQQALDSGKIRAAGLDVLEAEAPDLTSCGLLGRENVILTPHSAFYSAESILKLQRISGANMGYFLAGAQEKIDAVVEMSIFLVDEYKDMEPYLPGEQPKDKPYIKLNANESSMPPSPRVFEAISKGEIWNMSYYADPHCHEFRKAVAEVYGVTEAEVFVGNGADEVLSFVLMSFFRRGMKIYFPDITYGFYRTYAKTYGLDMEEIPVRDDFSIDIEDYMDLKGDIIFANPNNPTGMTVPIADIERLVKANPERMVIIDEAYADYSGETCLPLAVKYPNLVVVRTFSKSRNMAGTHIGFAVANRDIIEDMNKIKFSFNPFNLNSITMAAGIAAVKDTWYLDSCVKKTVAARERFKAALERMGFHVIPSKANFVFCYHDAIDSGELCDRLKEEGILTRHFADERLTKYLRITIGTEQEMEVVEIAIREILKEAVGEESIDMRLYECVGAMYVKDGTSVLKKVLVSKPQFLKPAPINEIAKLWKDTTMDVDIMLREHQEFVDAYHKAGVEVEYLEPDEMRPNAVFSRDFGGCVKEGYIMGRFKLDMRYKEHVDYKKRMEELGVPMIGEVKEGLFEGGDFMFMNEKWIAVGMADRTNEAGLRELRAILEPLGYEVTGVPVKQEYLHLDMCFNLVDEHLAVSYSRGLPEDFRRMLAARDIEIIDVPEEAIYLHGCNLQALGDHRVLSLKRNAAVNEQLAARGMDVIELDITEILKAGGGPHCMTFPLLRGMHNAGMEEVTEKLVTAAERAVQRSMESVNENYRRFCALSGKKVQPVLDRWGVMTYRELYEAAKENCTGLDSELDKETDRLLRENCDKRELPVSLIRLMLAKANIYHPVVVLYFAAPYCPHNTLQKDDAEYMEKLEKIVRETERETGFSYQICKFFPSLSDSSYLAIDDTEESIALLRSNFPQMEQLYPLPLEKICSLGIKAVDFGVYGKDAHKWTERLYLPYSFEVLPELIIKALKNFLMRDEMLELTRQMVRIPSVNTTPGEKEIGLFIEKYMREIPYFKEHPDQVIVQELKNDALGRRNVFALLRGEKDENADTVLFHGHMDTVGVEDYGVLAEYAFDPDELARKLAAVELPDEVRRDLESGEYLFGRGACDMKSGDAVFMVLMRHIAEHVKEFSGNILLSINPVEENLHTGIIEGVEILEQIRKQYGLTYVLAINNDYTCPMYPGDPHHYIYSGVVGKLLPCFYIRGQETHVGQCFEGYDPTTVAANLVSVINLNTEFCDGYEGEYSLPPVALKMKDLKGWYNVQTAKEALVYMLDVASLEKFDFWDHFTLISGASGVYRNISNVVILDYEGIEGDFSGFHEGDFVITNLLFAKNDPGKIYPAFLSLIEKGVSAFAIKTVFYSDLPDEVMALTEQRQVPVFLFHDIYIEDVILNITDHLRSLGNYSYYEELIDTFVCPPVHHDAIHRLLATLFPSGEGMLLYPFLSSAYLLRPALMNSVCSEPMITLNDYLYSGDTVLKILKKYTEDLRQSAARTGNEVDVRHCEFLSQIMELLEHNDFLTAQSQKIREFYKYMAREYPYLSFTFKGRIKSLIRAEAKFNGYVVEYIYDYYTKNGTYPPVSELQERLNCFRDLIAYRIVISMPKCHLKNPDDGEREEVRYLYEIANVLKGFLEERGFTAESAGGVKESDSPLLSDAVRPYYRDYIAHVDPDGYRSLHITFFDNSAKCYMEMQLRTKRMDDIAEIGPANHLGYEKKQESDRARRDAIPEGECVYFDEAYERCRRLHELELAKLDVNMFAAIDNSLINDGCGLYRGRLILPYEHLSRFQNDLIDMRIALIAVGIVVIVIGIAIACILDRDAGAYECPECKTRFVPEMGAYVMGAHTLTSRKLVCPHCGAHRYCKKVLTRMDQIKTGKFIADERKKKGYTQRQLAERLEISDKTISKWERGNGFPEISLLLPEWYRRLMRTIFVTHKHLDHIMGAVWMIRMICQHMSQGQYEGEATIYAHDEVIGLLRGMAENLLQKKQTKFLDERLHLVAVEDGETKTILGRATTFFDIHSTKAKQFGFCMDLGGGRKLTCCGDEPYNDSEKSYVENSTWLLHEAFCLHSQADIFSPYEKHHSTVKDACELAETMGAANLVLYHTEDRNLGRRKELYTEEGKNYYHGNLYVPEDLEVLDLMSQTQRKYDQEYKIQAVKLAKEIGGAKAAKELGIPEGTIHTWLKAVRAGTLDIGDGAHTPESAMSLAEELAMLRKRVKDQDKEIRRLKEENEFLEEASAFFAASRRKSARTKEMMFIAIKTKDGVIKGKLSFYCRMLGVSRQGFYKYLAIKDRPWKYQDLADAMRAIHAEDECNDTYGRIRMYQALLLKNPTGIKIPSERTVYRVMDEIGLVHRPKRKPNDITKADREARKSDDFLKREFKADKPLEKCVTDITEIKAKDGKLYVSAIFDCFDSSVLGLAMETNMKATLCEHTLDNAYLAHPDLRGAIVHSDRGTQYTSETYRQALSKYGIIQSMNSAGGRCHDNARCESMWARMKSELLYDRYNTESLTTDELKVLIWRYFINYWNNRRICSANGGLPPMIKRQRYYQSLGLAAMSTNIDNITMYNSIDVTHYNGYILRINCSQAETGIRTTPNSQCALDALAIDAPLEYAKLALDGEMQAWVDAEDSLEVFMLENIEYSDYKKREDIHGTVLYPAVMIAPIQNEVLTELIQKNKITSVFDPFHGSGTALYEAMEIDSNLHLVGCDINPLANLITRVKLDGVSKNIKDSLTLLIKHINNPGVVETIKFPNIEKWFRKDIIETLSIIKAAILQIENDNDRRFFWIMLCDCIRKYSNTRSSTYKLHKKESEKIERIENNLIKDYIKAIEQNFKKYEKCTENYILYKRDVLGLLKELPSRIFDISISSPPYGDNATTVPYGQFSMLDLYIIDKRDLELEGWELDNYSIIDRMSLGGNKKETKLGEFEKGLIKPYLDKISIEKQEKVIRFFNDYFVWLEGLCKVTDKFIVLTLGNRTVDRIKINLTEITQKYLESREFKNIEFAEREIPNKRTPKVTSMVDLKPVDSMTKEYIIVHERRKMQSRVTISGNIVSELSEKIPSNIIALNELIKNAYDAGAPSVEVSLDSTKKKLIIKDTGEGMNKSDIDTLFHISNSNKIYGSLNKKYNRYVQGSKGLGFLSVFKFGHKVQWETKKDKGYRFSLDYDSLVGQYDISECVIELIEDDSIEKGTKIEISIDDYNMNSLLDYFKEEKNYKKILNAFDDDTFDINIKIDGIVYKSSSSIKLLDNAPDYRLYQVTYNNDDGKIKFLYNNFPIIEEKFFVDSTRYKLGLELVIFQLPPHGKNKIDRLYLNPKNDLTPLMYVNCNLFNNYDMFDPNIMKNIKTDLVLNQMIGKIEIISADKAINFNSDRSQFLQNELTDEIKTVLQEINKKIQTVGSQHKKYLKEFKILTSSELPEECDTYTDVEQFRKFICSDFAFRELVEIERHNNKIKFALWGKEVWATIQGKTKTDSKGENKTGNGKTIPAIIRLNVNDYMKIQIPSEQIDLFSYIASVRNSKGEDVDKSKVKVKIDNKEVNNILPSITSTKKLNIEYSFLDSQTGLVIKNIILEFVVRMSDFSSGKTKPHLIMIPAAQNYTLNYNPYINKIVEQINQLDLKSYKEIIACCLRSLFEISLDAISKSTKYSNFFGNEKDFSKKVSMVIKYIKSNPKYQSEIATAAMIDYHSLGNMLDESAYETGVSKAHLGAHKSMTYISEMDVDNLGNLIGLFLVLVNEMLNNSNIQMPINNSYDEKAVIEAIAQALETFYANLIAKIDELNIQKIMKRKNPYLYRAKAMQNAAEIVESVLTAFVSSSEETIFGNCFFEPIAIAASNGNKALAEGIDIMIQDKGENTMYAIAVKSGPSVFNADSKKRQEQNFMAASKLAQQAKARYEAYVGYCYGKKKDSGRGKPKMYQELAGKKFWTELTGDEEFYKKIITYMGTLPEQYVAQYQESYNKAANRLVREFSNDFCKEDGSIDWEKLVEFNSGDMSKKRIDYSQYYSNRDVISFFSGAMGLDIGLEKAGLNVKIGQDFEPACVETMKANGHEVLGGDIRKIEPQQMLDLAGLNVGEPFLVCGGPPCQPFSTAGKRLGINDPRGSLFMDYIRMIDYIKPRFFIMENVKGIMSSPLKHVPIAERNADDPEQQLGTVLDVILSEFNKLGYKTVYGVLDAVNYGVPQFRERFVLIGSRDHEDIFLPVPTHFQMHQKEEYRWKTVGEVISDIENEKGECATLSMERAHYLEMVPEGGNWKDLPDDIKKIAMGGAYESGGGKVGFYRRLSYSQPAPTVVTSPVQKATMMCHPRMNRPLSVHEYARLQQFPEDWKFIGTTAAKYRQIGNAVPIGLAEAIGRAVIATADKTALIKTKRFRGTDIHNRIKNALELGGNAVCQMNVSEQIKILCIRSNISVSELARRVGTSPQNFNAKLKRETFTVSDLEKIAEVVDCTFERSFVLENGDKIMIEVLQNEKLKMFCDTSFLDKNIFLTETHVVMERTSFGAVEWIEEQKNWLADYMEKEIGWRRLFKGKNERGDLLLSDYRRERAAEKALEAEKERERNELALEAVKRDAEEQLRQYDSQINSKELRLTLTDTMLEQKQKELEELDVRAEQIKKECSEADEKLTDKKKEVERAQSELNNLEATKAEAEEQKRVAEEVRAEIVAGADYGDLVDKVVNLTYENQKLQEENRGLRYKLNEAYEFMKQFVINGRNMLEVFRERIGEVKEWVRQKVAGMIQAEYSNSYLDRMQNMITAFFNYAVSYFALSENPCRKAGRMGKREIVVNFWTKQEFDTILSAMEHDATAHVSFLLLYYSGIRFGEFLALTPKDFDFENNTLDISKSLQRIKRQDVITPPKTPKSIRNIIIPDFVMEEVKDYMSKLYNLKDTDRVFPFTKSFINNAMARACKATGVKKIRIHDIRHSHASYLINLGCAPLLISERLGHEKIQTTLSTYSHLYPNKHQEIVDIMQSQHQMDVAEAQKKGSQPKSKKFKVVSPENITSPKQVHEEPLDKCVGFAEDIMAKAKFERTKPHCNIGTIGHVDHGKTTLTAAISKVLAARVAGNTATDFENIDKAPEERERGITISTAHIEYETEKRHYAHVDCPGHADYVKNMITGAAQMDGAILVVAATDGVMAQTKEHILLSRQVGVPYIVVFLNKCDMVDDPELIELVEMEVTEQLEEYGFEGCPIIQGSALKALEDPMGEWGDKIMELMDTVDEYIPDPQRDTDKPFLMPVEDVFTITGRGTVATGRVERGTLHLNDNLEILGVKDDVQTTVVTGIEMFRKQLDEAQAGDNIGALLRGINRDQIVRGQVLAKPGTVTCHHKFTAQVYVLTKDEGGRHTPFFNNYRPQFYFRTTDVTGVCNLPAGTEMCMPGDNIEMTIELIHPVAMEQGLTFAIREGGRTVGSGRVATVIEMAGREYPLERTRNIGIMAHIDAGKTTLTERILYYTGVNYKIGDTHEGTATMDWMEQEQERGITITSAATTCHWTLEEFTKPKPGALEHRINIIDTPGHVDFTVEVERSLRVLDGAVGVFCAKGGVEPQSENVWRQADTYNVPRMAFINKMDILGANFYGAVDQIRTRLGKNAIVLQLPIGKEDDFKGIIDLFEMKAYIYNDDKGDDITVTDDLGDMKDDAELYRSELVEKICELDDDLMMMYLEGEEPSVEEMKKVLRKATCECTAVPVCCGSAYRNKGVQKLIDAIIEYMPAPTDIPPIKGVDLDGNEVVRHSSDEEPFSALAFKIMADPFVGKLAFFRVYSGTMNSGSYVLNATKDKKERVGRILQMHANKRQELEKVYSGDIAAAVGFKFTTTGDTICDEQHPVILESMEFPEPVIELAIEPKTKAGQGKMGEALAKLAEEDPTFRAHTDQETGQTIIAGMGELHLEIIVDRLLREFKVEANVGAPQVAYKETFTKPVDVEYKYAKQSGGRGQYGHCKVKFDPMDPNGEETFKFESTVVGGAIPKEYIPAIGEGIEEAAQAGILGGFPVLGVHANVYDGSYHEVDSSEMAFHIAGSMAFKEAMHKANPVLLEPIMKVEVTMPEEYMGDVIGDINSRRGRIEGMDDIGGGKLVKAYVPLAEMFGYSTDLRSKTQGRGNYSMFFEKYEQVPKSVQEKVLADKSKMPRKGHTQKRDVLADPMYNNKVVTKLVNNIMLDGKKGVAQKIVYGAFKRVEEKAEKPALEVFEEAMNNVMPVLEVKARRIGGATYQVPIEVRPDRRQALALRWLTTYSRNRGEKTMEERLANEILDAANNTGASVKKKEDMHKMAEANKAFAHYRFMVSVGIVSHRDIFPHEHEEADTCHYIVSTVELIEMKSSGSRDWRPGNADRVLYSKLMPTFNQLVRKGRQTSVKKSTAPALQRGYNSLQKKPTNTSSPQKRGVCTAVKTATPKKPNSALRKIARVRLSNGIEVTSYIPGEGHNLQEHSVVLIRGGRVKDLPGTRYHIIRGTLDTAGVANRKQARSKYGAKRPKAAKMKYRIKRKIGYVLVVAMLVVMIYPGELSAASGQEDGFVIKGTTLQGYVGAENAVVIPDNITKIDDDVFLNTTITSVEIPDSVTTIGDNAFAGCEYLTEVTVPDSVTKIGDNVFYGCTSLESATWESKEGIGDGTFAECAGLTDLSISRELPSIGKEAFKNCESLESIVIPEATKTIASDAFDGCVNMQSIDVEEGNTYFMSYDNALYTANGVTLYRCPQGARTIEVYDGTKMIGENAFYGCKLGKVTLPESVTTVEDGAFDGSEIQTLCLGKALEMFGEQNTSFKIHSIEVPGSAPAAPKLVETYGAIVVTDYKPDDTEDTEKPTEDTEKPTEDTEKPTEDTEKPTEDTEKPTEDTEKPADDNNNNNNDNNNSGNNNNSGDNSNNNNSSSDNSSNNNSSNNSSNTSSGNNSSSTGSGSGSSGKSNGTSSGRGSGSGNGSGRGSGAVKGSAGAAGARSSGTGSAAATTAETQGDVQPTAAEVPATTRFAEQGTAYITGNEELKGWDAIYTQMTVADPGSTIYITMNGTTVVPKDILTLAADKQLTLVLDMGNGISWTIDGSSIDTSVVADTDFGVELGTSNVPANLQSTVTGSGWSTQMHLAHDNLFGLTAQLTVNVGAANANKLGTLFYYNVDNQILEYMGQSDTDADGNVSFSFVHACDYVIVVDERHSDSTAQATSGFVITPAGGSQAESQPAETTEAAETEQPADNAQAADDSQVKDETPKTGQSLNPKYVLCIGVMLLGIYMILTSERQEKQRKRANGMAAYKIGNFTFDTEEEYARGLEDAKKIEKIQSTVDLNEPETALRLYWLIRTGKIKFGSKVGKKFFLDIADAVAKSAAKNITQAQAPEQQAGEEPRQGAQDRSRKILGAVCVTAAFLCFGWYFWSDYTNHRGSQANEYLKMLKENPTEAAEMVDNDTFFSEDAPELAAGLDQTERENEPPPPVLPEYEAIVAQHSDFAGWITIDGTKIDYPVMLTPNDGDYYLKRNVNGEDDINGTLFMDPRTDLVQRSTNIIIYGHNMKSGAMFGSLKKYLDEDYWREHAQIRFDTIYEKGTYEVFAVCLAKVQYRNSQEFRYYDFIQADSEEAFNDYLDHIIQLSVFTGTDLPVYGDELLTLSTCNNFTEDGRLFLVAKKCREAEMAKVSSTGNPATIEGIAAGSTTITAAYAGESYTCNLTVTPNLSEDAVTVSPENPVYNGGQQIPSVAVQVGDTILKENDQYQLSYAQMVGGAAATFDPATDTTALVNAGTYYLYITGQNGYSGKIQKEYVIAQKDISDAAVEVTLQDNIDWDKVLADAAADPDNASATLTSCIQEVKDTARADADAVDGVKNLVEGTDYTISLSKTGRGITLTGTGNYTGERYCGAPRNAADANVVFDKTSYVYTGSEWTPAFQLLVDGETISQADYDAVYSDNVNVGQATLTITGKNSLYGTKTVNFEIKAKDIGNKDQEEVGMAVSVTAAAAGGADKEPVITATYNGMTLEKGTDYTVGTDIINAGNGTYRRVITGIGNYQGTYTVEYQAAGADLSDLIQKVTAAAVTYNGNAQTPEPDITWKSGNNDLGLVEGTDYSVTYASNTNAGTATITLQGMGTYGGAVTGKFTIEQADMSKAVCYYVDADGSEVSTANYKMEYSPDGADVKPKVVVKFAQGADMVTLPESDYKLTYSADTKIFAGTASVEIAPSDSNSNFKTGTTKRLTYTIAQCNLTSTKITASIDRELFDYTGAEIALPTESVVYHSASKTDHTLKKGTDYTVACSPTTVKDIGTYTMTITGSGNYTGVVTKTFEVTAVDIQTLINDKNLKVTNSADRMVTGYDGPYWAMLWYSNNKNDNQLEISLTDNQGNTLVKGTDYELKYDGIKDISKEGSTASVTITGKGKFYGKQEIKYLLASKLDEDYDVSVNPAENPVYTGDPITLATDEISVSDGGFGLWKSVLEQGTDYTVNYSDGTNADQAINAGEATVTVEQIPLEDQPTANGCYVYSDGATKLSATFTIRPKDIATGVSYEAIKKAYDGNAVTLTESEIKLTYNKKTLTAPTDYSIVAGSYANNEKPGPMANVTIQGNGNYTGTKIIVFTISGKSLDEIISWKVDENETTYTGERLYPKITELTLSDGTKLTTADEIEKVIAYDESSYADNLNAGEASLTVSGKGDYYGTDDRTLTFAILPRSLDNNCTLGGLKSGYTYTSEEITPVPTVQCTDLKKKLGEDDYKISYENNVDAGTATMTITGKGNYQGTFTKDYTIAPKNLAEPEVKIAPIDAQEYNGMAVTPAPSVSYEFGDGTYALSPVNDYTVAYANNKGTGTATVTVTGTGNFTGSKTAEFRIGQLITNETKFTISCPALTDGTQYVYDGSAFEPEVTVTRIEGNKKLVKDSNYSVTYTDNIHAGTATVSVEGLGGYVGVWQKTFAIAPRDLTDSSVELSVGGVTDGSYQTQYTGSPVEPEVELTYDGQKISTTDYTVSYGADHTSRGTVTLTATAKDGTDFTGSRSTTYTITLASIGNGGYTPANGFKIGAIEPQPLVDGTATPQPKLYYNGTELVMGTDYICTYEKNDSIGSDAVVILKGIGNYTGSVKKTFKICANIADAEITVPDELWFKDYVNAGETDIAIGDKNITFDDQISVVLNGTTLQKDTDYTLVYADNSWVGNAVVTIKGMGGFAGSVEKTVPIKADLSEAGIQVAIGDQQYTGDPVEAIPSISYYGTELTSGKHFVIHTYENNVKIGDKTASVTVIGNEKNGFTGTLTENFSIVANAGILEVSGVESSYLYRGTQIRPQVTVKIGNKTLSTSDYDVTYGENIKAGTDGGSIMVKGKNEYAGLIKLVTFDINPLQMDDLKVLDGTQNAIGSREYTGKEIVPEFSLKTTIGSTDYILPARSYTIAKKADADNTNVGTGTVVITGDGSNVIGSREVSFQIVAKSLAKPSSGTDLIAVEVIPDSFSYDGTEKKPTVLVTYQYGTEVEVRQLTEGSDFTVAYSNNINAGTATAVISGIGNYTGSRTVEYTITEKSFDGAIVTFPNGTSYPYMGSDNGVEPEVQVTLDGNVLTAGTDYEVSYQNNKACGTATVTVTGKGSYAGSVTAPFTIVSHDIAAADVTVDPIPNQAYTGQPVIPEVKVTCGDYTLKQGEDYTLSFDTDNTEIGTVLMRINGTGGFTNYRQATFHIASDISQAEVIGLDDSYPFTGSAYTPDDLGITEVRIGETVLTTDSYSFAFDENSDGMSAGTQTLLLIGQGSYGGTKKCTIEITPKDITDEDVVMSGFEDTVSYSEQITQNVTFQWGEIALVRDTDYTVTCRPAGVAGTYEMEAAGTGNYTGTVTKQFSVDQTPIDGLEVKGVSSTYTYTGKAITPEPEVWADGVQLEKDKDYTVSYEDNINAGVAKLVITASGTHYAGTKELSFQILRKSIHLCDIGSIQTQVYTGSDIKPTVTVEDDGKALELLSDYTLMYSNNRKAGTGVAAVAGKGNYTATKNLTFDIRPCDAGAAVVTGASADSLSISWTGDGAVTGYEVYRAGADGKWQQVTRTRDAFYTDKKLAAETTYSYKVRSYLVADGETYYGEFTGAVTGTTTKMYKDVCKRISAFMLTVCLIVTMVEWPTTVWAGQGTVNTYRNGDGVLAGAPCEAQAVAAVFTANRNADGAELLDSIDFYAHVDDGSKATATVEYYKDVEGMAPDAGTSIFQKEVSVKEGKNTYSAGLANQVMENGSRFSVIVRLSGASFYVYGGTAEGESYILGNAGWQDMYTANGSCAAVIAYTYDVTATSGRSSSNAADQAALQSSNVKQSAAVALNKNSMTIGEGWTDQDLTLQNATGTVTMPETMNKEATGQSISFDAIKIGLASPEKIHEWSRGEVKKPETINYRTLKPEKDGLFCEKIFGPSKDWECHCGKYKKIRYKGVVCDRCGVEITKASVRRERMGHIELAAPVSHIWYFKGIPSRMGLILDLSPRTLEKVLYFASYIVLDAGNTALQYKQVLSESEYQEAREQYGNAFRVGMGAEAIQELLHAIDLEKDSAELQAELADATGQKRARIIKRLEVVEAFRESGNKPEWMILTVIPVIPPDLRPMVQLDGGRFATSDLNDLYRRIINRNNRLRRLLELGAPDIIVRNEKRMLQEAVDALIDNGRRGRPVTGPGNRALKSLSDMLKGKSGRFRQNLLGKRVDYSGRSVICVEPKLKIYQCGLPKEMAIELFKPFVMKELVANGTAHNIKSAKKMVERLQTEVWDVLEDVIKEHPVMLNRAPTLHRLGIQAFEPILVEGKAIKLHPLVCTAFNADFDGDQMAVHLPLSVEAQAECRFMLLSPNNLLKPSDGGLVAVPSQDMVLGIYYLTQERPGAKGEGKFFKSVNEAILAYENGAVTLHSRIKVRMSKTMPDGKKITGIVESTLGRFIFNEIIPQDLGFVDRSIPGNELKLEVDFLVAKKQNKQILEKVINIHGATRTAEVLDAVKAMGYKYSTRAAMTVSISDMTEPPEKPQMIKDAQDTVDRITKQYKRGLITEEERYKEVVETWKETDEQLTHALLSGLDKYNNIFMMADSGARGSDKQIKQLAGMRGLMADTTGRTIELPIKSNFREGLDVLEYFMSAHGARKGMSDTALRTADSGYLTRRLVDVSQHMIVRESDCCEGTGREIPGMWVTAFMDGKEEIESLQERITGRFSCNTICDAEGNVLVKANHMITPKRAALVMSKGVDENGEPLTKVKIRTVLSCRSHMGVCAKCYGANMATGQAVQVGEAIGIIAAQSIGEPGTQLTMRTFHTGGVAGTDITQGLPRVEEIFEARKPKGLAIITEFSGVANIKDTKKKREIVVTNNETGESKAYLIPYGSRIKVMDGAVLEAGDELTEGSVNPHDILKIKGVRAVQDYMLREVQRVYRLQGVEINDKHIEVIVRQMLQKVRVETNGDSDMLPGTLVDTLDFEDTNELLEKEGKELAEGKQVLLGITKASLATNSFLSAASFQETTKVLTEAAIKGKVDPLIGMKENVIIGKLIPAGTGMKRYRNIKLSSDIDENEEIAFDDFDDFDDTDVVDENYALEENVPEESEDTEEMEKNRIRPVKAGKGIRMSYSRQKEVLEMPNLIEVQKDSYQWFLSEGLKEVFDDISPIADYSGHLSLEFVDFTLCEDDVKYTIPECKERDATYAAPLKVKVRLHNKETDEINEHEIFMGDLPLMTETGTFVINGAERVIVSQLVRSPGIYYGIAHDKVGKKLYSCTVIPNRGAWLEYETDSNDVFYVRVDRTRKVPITVLIRALGVGSNQEIVDLFGEEPKILASFGKDVATNYEEGLLELYKKIRPGEPLTVESAESLISAMFFDPRRYDLAKVGRYKFNKKLMLRNRINGHVLAEDVVDVSTGEIIAEAGTEVTRSLADDIQNAAVPYVWIQGETRNIKVLSSMMVDLRHYVDCNPKDLGITELVYYPVLKQLMDEYPDVEDLKEAIHKNVHDLIPKHITKDDIFASINYNMHLEYGIGHDDDIDHLGNRRIRAVGELLQNQYRIGLSRLERVVRERMTTLDLDGISPQSLINIKPVTAAVKEFFGSSQLSQFMDQNNPLSELTHKRRLSALGPGGLSRDRAGFEVRDVHYSHYGRMCPIETPEGPNIGLINSLASYARINEYGFIEAPYRKIDKSDPKNPRVTDEVVYMTADEEDNYHVAQANEALDEEGHFVRNSVSGRYLDETQEYEKTMFDYMDVSPKMVFSVATASIPFLQNDDANRALMGSNMQRQAVPLLTTEAPVVGTGMETKAAVDSGVCVVAKKAGVVESSESNQIIIKNDEGGRDIYKLTKFSRSNQSNCYNQKPIVFKGDRVEVGEVIADGPSTANGELALGKNPLIGFMTWEGYNYEDAVLLSERLVQDDVYTSIHIEEYEAEARDTKLGPEEITRDVPGVGDDALKDLDERGIIRIGAEVRAGDILVGKVTPKGETELTAEERLLRAIFGEKAREVRDTSLKVPHGEYGIIVDAKVFTRENGDELSPGVNQAVRIYIAQKRKISVGDKMAGRHGNKGVVSRVLPVEDMPFLPNGRPLDIVLNPLGVPSRMNIGQVLEIHLSLAAKALGFNIETPVFDGAKEIDIQDTLELANDYVNFEWEDFEAKYKDTLNEEVMKYLYDNRAHRALWKGVPISRDGKVQLRDGRTGEPFDSPVTIGHMHYLKLHHLVDDKIHARSTGPYSLVTQQPLGGKAQFGGQRFGEMEVWALEAYGASYTLQEILTVKSDDVVGRVKTYEAIIKGDNIPEPGIPESFKVLLKELQSLGLDVKVLDENRNEVELMETSEYGNTDLNSIISGDKDFAFEDSESFAKMGFSQKQFDTENEELVDVEDEEEDEDDSEFFDESSDDVLEEEMNGITSMQRSSTSYADYGKFASGKKVNRAADGAAELAIIQKQETQTRSYKVGENNIGAAKDMLNVADGAMSGITDYLQKIRELGVRASNTVTITDAERTSIQAQIEQYKQGISDIAKQTSFNTKPLLDGTSQKYNIMTDATGNGMKITTADATLQALGIADFDVTNDFDLTQVDDALARVSAGRSGMGAQSNALEYAYRYSTNTRLNVTAGKSRLEDLDYGQAVSEQKKKQTLQQYAFFMQKKQMEQRTRAAANFLVSMPCLRMSVNRLREGMMIKEDVFSKTGAVIVPDGAVVTKDVVALLTRHFVDSVMVEYPTGRKERPEQQEQSAPAKEQHLKEFRAEFSVAEQSISEELKDIVYRSKDVNISMLLEPLNGLLKKADDDTDLADMLLHMKKQQSGLYAHTINVALFGQLLARWSGCAEAEMEEVMAAGLLHDIGFLELWKDGQEQTEFLQEYETERYEKHVVSGYNLIKKMNIDQRIKQAVLTHHERVNGSGFPLQVMGDNINWISRILAVADTYDALTMRQGDKAGISAFEAIKKMEDEGYNRLDANYLMTFLKRIAETMIQRNVILNDGRMGRVVMINKYKLSCPLVQVGDTFVDLAKQSRYYIQEILEEMAKMTTAEFIDAIKELSVLELNDLVKACEEEFGVSAAAGVVVAAAGAGDGAAAEEKTEFDVELTEVGPNKVKVIKVVREATGLGLKEAKDLVDGAPKVLKEAADKATADDIKAKLEAEGAKVTLKMAKVELKQPIVQEISENIKDAQSVVVVDYRGLTVAEDTQLRKALREAGVTYKVYKNTLVSRAVEGTQFESLRDVLEGPNAFAISTTDATAPARVLADFAKKAPALEVKAGVVEGNFYDEAGMKAISSIPSREVLLSKLLGSLQSPITNLARVLNQIAEKGGAADAAVEAAPAEEAPAAEAAETPAEMKRGKKYQDAVKSFDKANQYDVAEAISLVKKNATAKFDETIELHIKTGCDGRHAEQQIRGAVVLPHGTGKTVKVLVFAKGVKLDEAQAAGADYVGGEELVPKIQNEGWLDFDVIVATPDMMGVVGRLGRVLGPKGLMPNPKAGTVTMDVTKAINDIKAGKIEYRLDKTNIIHVPVGKASFTEEQLSDNFQTLMGAINKAKPSSLKGQYVKSATLTSTMGPGVKLNVTKITNMAKKVEGYIKLQIPAGKATPAPPVGPALGQHGVNIVEFTKQFNARTADQGDLIIPVVITVYADRSFSFVTKTPPAPVLIKKACNIKSGSSTPNKDKVATLSKAKLQEIAELKMPDLNAASLEAAMSMIAGTARSMGVNVEQMAEAHWYVVHTYSGYENKVKANIDKTIENRHLEDQILEVRVPMQEVVELKNGAKKSVSKKMFPGYVLINMVMNDDTWYVVRNTRGVTGFVGPGSKPVPLTDMEMRPLGIKTENIEVDFAEGDTVVVTGGVWKDTIGVIQAMNPGKQSVTINVELFGRETPVEISFADVKLANMGETENKAAQKESFFSGLSAEFKKIIWPDNKSLARQTAAVVAVSVVMGLVIALLDFVIQYGVDFLVGLSFMAVIDSAYQYYLSTYAGSGMSRYDTHKKSQLRAVYNNIVKVNKDSPLYKINFTRDTGRFAIDIKEQARSIENFIAALSNNAPDDNAEHAFSRKIAQSSDEDAVSVQYIGSNMDADNSKQFDITVERLATPQVNRGVYLAPGASDFVPGNYSFDLNTNLSSYEFQYTISGRDTNETVQRKIMRLINNANIGLNATLVSNDRGQNALSITSQQTGLGDSEQYLFEIMPAPDSGSIRAMRTLGINDVTEMPVNSLFLLNGTEHSSLSNTFTVNNAFELTLKAPSADGESATIGFKADTDAVADNVQSLVNVYNNMIQLGHNYHGSQESGKLLHDMESVAKSYFNELESIGLNLQQDGSIQIDKNLLTDAVSAPDARESFRTLNNFKNGLQRKATQASIDPISYVSKVLIAYKNPGHNFAAAYHSSVYSGLMLDTYCMASAIENKADANSNIGFARLCFIQKRRQALHKSPKIVCGLRTLSAECSKLGKTRIIGGTKRGIDMEQPILSFLTAYFSDLHIQCRLTDRKQLELADLDLGLRNSILMQEADAQKQAPFPFVQNTIYFIVDYYECNYSFFRLPDKSAFLFVGPFLWREFERSQILSLMNRLDIPTELFPQLQEYYHALPLIADKASMTALLRHVYQTLDADADVSVQTLHLKDLETRESFLEKHQFVVPEDPVLSMHLLEERYHIEDELLDAISHGNSARALSFMEALGNLRFVPRTEDALRNRKNLILTLNTLLRRKAYETGVHPFYIDAVSGNFARMIESIQSVEEINDLISYMVQSYCQLVEQRSMSSYSDPIRQILVTIDASLTGDLSLKRFASELFLNTSYLSTLFKKEVGMTLTDYVNANRIEYAKKLLRSTLLPVQDVAAACGIPDVHYFTRLFRRITGMTPREWRRMKITAYEVRPDEKDYLLAAAQQEQIEITLVQGPMTQDNIDRAEGADGITILGDTKMDAALIEETAKRRIRVVATRTIGYDHIDLNAAKSNGVHVCNGYYDPDGVAEYTVMLILMSLRNYKQALFRGNANDYSLGGLIGRELRNLTVGIIGTGKIGQKVAQNLQGFGCRILAYSRRQNADPALGIEYCSLEELYAKSDIISLHTPLSNQTRYMIDKKAIDQMKDGVILINCARGELMRVDDIIEGIETRKIGALGLDVIEHEEGIYHMDRRSDILANRNMAYLRQFPNVTMTQHIAFYTEEAVKSMAESGIVNVVKCLKKQDNPNLICMKGTVKWFNNQKGYGFISDESGNDVFVHYSGLNMEGFKSLEEGASVEFDVVEGSKGPQATNVTVVKMIALSLPEIKDFMNKLLCTDTFGHFLLKEAVILGSVTWSLDGTIQPDFYSSDEADALGLTGLSFLPFEQVRPQCFDLIKGKRTPSYFKFVFLLSPKNLERTLLSTHSSFTPEDITGMFINLKFQQKKLLLTTGISYRIFSVDKSLDQEWDSLVKRFLTAHEISFEELMKETELLFDLLKKGVSPVQAVCACKERLESAGFLELPYDEPWKLQKNGRYYVNHHDTTLFAFTVGEGWQETKTPQIRMAAAHTDFPCLRIKPSADVTACGYAQVNVEVYGGAILNTWLDRPLGIAGRVAVRTQDAFAPKIVEFVSEKNLLTIPNLAIHMNREVNKGVELNRQTDMLPVFALLPEEEKKADYFLTFLADELSVEKTDILDFELTVYCKENPEFIGLNDDFISSPRLDNLTSCAALISGLMDARRMEGINLIALFDHEEIGSHTKQGAGSILLHDMLRRILKELGREQTAEQDLYRSMLLSVDVAHGIHPNQAGKMDLTNKPVLGRGFCIKEASSQSYATDCEAIAIIQQICEKEKIAYQKFVNRSDMPGGSTLGSIASALLPVKTVDIGIPLLAMHSARELMGSADQQALKDLVTAYFTLASMYKIVVDSCGELPEELKKDGHFETVSLELEVDGYRIKDDETFNQLDFLRRVKKSITGPKSSCPSPEQYMQAYEGEAEHVYVVTLSGKLSGSYNSAELGRNLYEEEHPGENKQIYVFNSRSASIGETIIGLKVQEFEEAGLPFEEVVARTEEYINSMNTYFVLETLETLRKNGRLTNLKALIANTLNIKPVMGSTKEGMICQLGQARGMNKALEKMVQDMIGRTKDCEQRVLAIAHCNCPERAAAVKARIEKLANFKKIIIINTAGVSSMYANDGGVIMAVMTYEEVVDQINQIRRFGNLAGVEVAGRMLKALGSPQAGIPLIHIAGTNGKGSVSAFLCAILREAGLRVGMFTSPHLVDFRERIQINGEMISKEDTQRIGVQLLAMDFGVQPTMFDVTLAMAILYFKEQRCDVMILETGLGGRLDATNAVGVPDVTVITKIGYDHMAVLGNTLAEIAAEKTGIIKKGTSLVLESQEAEVMTVFEAKVREEGITDFRLIDPLEIKEQTYRDGRQYFSFGAYRDLSMRMLGVHQYENAIAALLGAEAFFRRHTEWICGGTKEREEGVRRAVCQGIAKTVWKGRMEILSKKPFLLVDGAHNSNGVEALRESLVALFPGEKFHFIMGVMADKDYETMIGELLPLAIDFTTCTVECERALQADALADCIRRKGITAASADDFASCFQRGRLDETHRTVAFGSLYFIGEIEALFEAKMLFSSFEFLFRFLPVFLVIYYLTPKKFRNVTLLGGSIVFYTIGEAGYITILLACVLVNYTLTRLMYRKNTDGRGIRQKRLLLLALGYDLGVLFFFKYSGLASGLPLGISFYTFQIMAYVIDVYRGRIPAEQSLLRLGTYLTMFPQLISGPITNYADVRVALGRERTIKARQLEEGMKLLISGLAAKVVIADRIGTLWNSIRMIGFDSISTKLAWMGAFAYSLQLYFDFAGYSMMARGIGKMLGFELPVNFRYPYISKSVTEFWRRWHITLGRWFREYVYIPLGGNRKGKARTFFNLFVVWSLTALWHGANYNFLIWGGILLCCLLAEKLFLLRLLDKSRVIGHLYVLFVVPLSWVAFAVTDLSELGVYMTRLFPFAGHAAGVINHLDYIKYLNDYAPLFLLGVLFATPLPETCYRLIERKWIGRVILLGIFGLCMYYLAVSANNPFLYFNFMRKLLKCPVTVALLILWAALSVVGYLGKDTIYKNYTVDIRTTPYFVLVFDGLHDGIFPWSHVGAPGGIGENGKLPSILLPGESVSDTELAGGTETVGETETEEAPHTREFCMVDDDWFDDAVFIGDSRTVGLRDYGGLDNATFYASTGLGIYDMWTEKFCEVDGEKTTLEDALSRRQFGKIYFQIGINEMGRGTLDGFMEQYAQSVQKFRELQPDAIIYVQGIMRVAKAKSDSDKIFNNQGINERNMRIAELADNQTIFYIDVNDVVCDADGNLRADLTFDNLHLYGSKYGIWVDFLKTKGIAPMQASPVFYDIAPEEIHAMLDCLSAKTLSYPKGSFLFHYGDHLDSLGLVLEGCVDVMKEDFWGNTNLMTRCRPGDIFGESYAIRTNCALEVSLYAEQNSTVLYLNVSKMMTLCSRACEFHNQLTRNLLSVLAERNFQLGQKLEHMTKRTTREKLLSYLSSEARRSGSSSFDIPFNRQQLADYLSVDRSAMSNELCHLRDEGLISFQKNHFTVQFPSSMLRRVIEIEEEKCNGCGACANACHEGAISIVNGKAKLMRDDYCDGLGDCLPTCPMDAIHFVEREAAAYDAAAVEENKRKKAAQQAIASQPLPCGCPGTQAKTIRHEQQAVCPTAAEESAAELTSELTQWPVQIKLVPVRAPYFDGAKLLVAADCTAYAYANFHKKYIRNHITLIGCPKLDDVDYSEKLTQIIAQNDIKSITVVRMEVPCCGGIEQAVKNALAASGKMIPWQVDIISTDGRILEMALTMKITEVHAREILDSRGNPTVEVEVTAETETTGRKTTARESVPSGASTGRFEAVELRDGDREYFGLGTKKVVDHVNTKIREALLGMNVLDQALIDRRMVELDGTDNKGNLGANAILGVSLACAKTAAAALDMPLYRYIGGGNAKRLPVPMMNVINGGVHAKNSLDFQEFMILPISAKSYREALRMGAEVYHFLRQILNEEGYATAVGDEGGFAPDLADAGEVFRYLGKAVEKAGYTVGKDVVYAMDAAASELYNEETGMYHFPGENGICRDAKEMIALYEDLAKRFPLVSIEDGLQEDDWEGWQSLTGRLGDGMQLVGDDLFVTNPKRIKCGIKLNAGNAVLIKVNQIGTLTEALDAIEMAQCAGYHTVISHRSGETEDAFIADLAVAVNAGQIKTGAPCRAERTAKYNRLLRIEEELGETAQFSPAEPFGRAMAILKTILTVVFILICLALTVIILLQEGKSAGLGAIAGAADTYWGRNKGRSMEGRLVTGTKILVALFIIIAAVLNLGIFMREELLQERKKAIYGLICDELYVPMKAKEIAAVLNVPKSDRRDLAEVLDALVAEGKVEVSSKGKYMKSEGKFLTGVFIAHPRGFGFVTVEGEDEDIFIPESQVNGAFHGDTVQVTLTRAEGHGRRREGQITKILTRGVSRIVCTYEKSKTFGFAVPDNPRFGQDIFIPQERSKGAVSGHKVVVELTDFGGNGKKPEGKVVEILGHVNDPGTDILSIVRGYDLPTEFSEKIMNQVERVAGEVSTADMAGRMDLRDWQTVTIDGEDAKDLDDAITLTKEGDVYRLGVHIADVTNYVQERSALDVEALKRGTSVYLVDRVIPMLPHALSNGICSLNAGENRLALSCIMTVDAKGNVIDHVIAETVIKVDRRMSYTSVKKILEDHDEAEIRAYEELVPMFERMRDLAAILRKKRMKRGSIDFDFPETKIILDAQGRPVEIKPYERNVATKIIEDFMLLANETVAQDYFWQELPFVYRTHENPDTEKIHKLATFINNFGYSIHIGQDEVHPKELQKLLLRIDGTPEEALISRLTLRSMKQAKYSTVNTGHFGLATSYYCHFTSPIRRYPDLQIHRIIKDNLRGRMNAKRIEHYEKILPEVAKHSSEMERRADEAERECDKLKKVQYMSGHLGEEFWGVISGVTEWGFYVELPNTVEGLVHVTTLTDDYFHYSESTYELIGETTAKRYKLGQKVKIVVAATDPFMRTIDFRVVTGTEDEENEKLNQKFIAEMAKTEKKLIANNKKAYHDYFLEERFEAGIELHGTEVKSMRMGKCSIKEAFVRIENGEVIVYGMHVSPYEKGNIFNKDPLRPKKLLMHKSEIRKLTGKLAEQGYTLVPVEVYLKGSLVKVEIALAKGKKLYDKRQDIAKKDMRREAERDFKVKNLYMSVEKRQKEQEKTSMVVEGFLFANEAEAAQARKEAEGVKYVKEKAQMDDPEMVLRIYNKMIQQRLFDTAVGYSYLKDLQEYLQSIPFIRKEDIFPIPVQHPQVEESLRKAKRAPAPKPKTQTVVKNADYRRRYRIVRWIAFILAVCVVAMFAITATTNNTTVLNYENQLINKYEAWEERLDQRQEAIEAKEKELGIMPEMDKIRILVVDDESRMRKLVRDFLVREGYEVLEAGDGEEALDLFYREKDIALIILDVMMPKRNGFEVCREIRETSKVPIIMLTAKGEESDELNGFELGVDEYISKPFSPKILVARVGAILRRSGKTQDEEAAVSMGGIVLDKAAHMVTVDGERIDLSYKEFELLAYFMENAGIALSREKILNSVWNYDYFGDARTIDTHVKKLRAKMGDKGKYITTVWGMGYKFEVTEEMKGLFDKKRQGRGRRPKEGGLTREIAGIIIGLVAGTVALCWVLNTVFLERYYVMNKENVLLSGFTTIDAASEDGSLDDSSFDVTFDNLCANGNITVMVISPDRTIVRSSVNDTQRMLIEFTDIIFGGTQNETTVLAQAEDYVIQRRTDTRLDAEYLVLYGTLSNGNLVLMRSALESIRESAKTSNQFLLYVGILAIAVSTVVSVFISKRITDPILELTEISKHMTQLEFEVCYTPKGKRRNEIDELGTHMNEMSQALEHTISELKSANNQLLLDIEKKTQIDRQRKEFLSNVSHELKTPLALIQGYAEGLKECINDDAQSRDFYCEVIMDEADKMNQMVKKLLTLNQLESGNETITMERFDVTELIRGVLHSVDILIGQSGITVTECPAEPIYVWADEFMTEEVVTNYLSNAIHYAGGKKEISIRCREQEKNVRIRVFNTGDPIPEEDIDKIWSKFYKVDKARTREYGGSGIGLSIVKAIMDSFHQQCGVINHEDGVEFWFELEKGKRSMRRTRIKMMAAVMAATMLLGGCGDALYDLTDDEENVIVNYAAHIVTKYNTYQREGLTYVSPEEPEETQEDVTVPQTPETQDASETGTAASAEDTAPAVSVAAAGSASLDELFGADGIQMTYAGAQLAPGYMEGDYYEMTPDAGKQYLVLSIDVTNTGADGVGLDVLSVSPKFTVVLNQSVKSTAETTLLDTDFSTYQGTIPAGGSTRLVLVFQVPDDVASADSVELYVQMDQMIQIILMDTNILLESGTNELEVLEFTLGNNHYGINVAKIREILTYQPVTPVPNSHPSIEGIFMPRDTMISVVNLKRCLGMPDDAKTEGLFIITNFNKLNIAFHVDAVLGIHRVSWEAIIKPDATINTEQNSASTGVIKMDDKLIIILDFEKIVTDISPETGLKMSDMDDMGQRERCESPILIAEDSPLLSRLITDCLKKAGYTNLIVTMNGQEAWDKLQEFEKAGNVREKVHCIITDIEMPLMDGHRLTKLVKTNDNMKKIPLIIFSSLVNEEMRIKGEQLGADAQLTKPEIGSLVSAIDDLIDKSMDMSGAEEYLDGLLHSVEGGSPADTARETEPGDTADGLYAEKEQETKKAGMSEEDDFLKSFEADTDLEGDADTFIRQFEDELDQAPREERTQKTTEENNQFFKDLDGILDSARDADESTGGAEAAETAHASEDGDLMVDTIGDFQDDDSDLMDLLQSEGDFPDMSQMADPTAPSADTDAEMPDVTAMPETADEVQDEDDGKKKKRRKKKKKDEPDAGDEAPAKEKKSLIKRIGDALFGEEEETEEAPADTGELQPEGLEQAPELDDLSDENLKLLQELEGTGAAEPEAEAEPEISEEEKKAQAKKEKAEKKAQAKKEKAEKKAQAKKAKAEKKAQKAKKPKKPKEPDNTPPLPKKPVALIMVMAASFLALVLVGTNLFGYTLSFNNAKQAYELGDYQAAFADVSGLTVKEADQETYQKYSIMANAAGEYQAYQTFMENGIYDMALDSLIRAVGRCDKYSEEAAAYGCSTELAKIRDQAVAGLSGFGLTQERAQELYAESERDTYSQELYSILAAAGLGMIAIIDYDAGNLKSVEKAFLALGEECVVTRDHDSIRRADRVVLPGVGSFGTAMQQLKKYELDQVIREVVQEDKPFLGICLGLQLLFEGSEESDGVEGLHLLDGEIVKIPEAPGLKIPHIGWNSLDFPHEGRLFAGLKEQPYVYFVHSYYLKAKDPSIVKATTEYSVTIHASVEKGNLFACQFHPEKSSTVGLQILKNFAEIMFTKRVIPCLDVNGGRVVKGVNFVNLRDAGDPVEIAAAYDKAGADELVFLDITATSDARNTVVDMVRRVAERVFIPFTVGGGIRTVDDFKALLREGADKIAINSSAINRPELISEAADKFGSQCVVVAIDARRRADGSGWNIYKNGGRIDVGLDAVEWAMKADRLGAGEILLTSMDCDGTKAGYDIELTRQVAENVSIPVIASGGAGTKDHFYDALTKGKADAVLAASLFHYKELEIMDLKNDLAARGVSVRRMSMIDNDWLPAIQGEFRKPYYRELYTFVREEYSRTVVYPPAEDIFNAFHFTPLSEVKVLLLGQDPYHNVNQAHGLSFSVLPEQKEIPPSLQNIYKELHDDLGCYIPNNGYLKKWADQGVLLLNTVLTVRAHQANSHQGRGWEQFTDAVIQAVNAQDRPIVYLLWGRPAQSKIPMLTNPKHLILTAPHPSPLSAYRGFFGCRHFSKANAFLEEHGTAPIDWQIENIMRVKAIMMPFSKLACISVENTVEEAMKIIDEQGLLSLPVVDGQQFVGVLSKQFLFEEFFRNYTGTREEFAQRKVMEFMKTRIETIGENTRIEEAAAMFITSKVRFIPITNEQNKLLGIVTQQAVFKEYQKIFGNKHNSMAIYTYDIRGVLGKICELIAKEGGDICNMMVIPTDVMDLAEIFLRVEAPDFERVVRALERHGYDVRDVKYNDQKMCGAPLCLHKKELPKMRSAQTLARLGYYEKIIKYIVTNCLVFMASISGYDSSSLGVLFSSLNRNNTTSSLLGGGSDLLGINYSDYATIRNGSYFKLLSAYYSKSDSTDSATKVSPSISTAKDDAKTLTRIESAAESTEKSLSKLTATGKDSVFNKVEKTAEDGTKTQEYDRDAIYKAVKSYVDDYNSLLDRADDSKTKSILRAANSLKSNARANEKTLEKAGITVDADGRLSVDEKSFEKADMDKLKSLFTTHGSYATQTNVDLLKIASNAKSEAAKANTYSKNGMYTYNYSTGDLYNSGIMAGKKVVVGMSGGVDSSVAAYLLKQQGYDVIGVTMQIWQDEDQFTQAESGGCCGLSAVDDARRVADRLEIPYYVMNFKREFKKNVMDYFTAEYLKGRTPNPCIACNRYVKWESLLQRSLEIGADYIATGHYARVEQLSNGRYAIRNSVTAAKDQTYALFNLTQKQLSHTLMPVGDYTKDEIRAIAEDIGLMVAHKKDSQEICFIPDNDYAGFIDRECGEMVPPPGNFVSVDGEILGRHKGITHYTIGQRKGLGIAFGYPVFVTEIRPETNEVVLGSDKDVYTNRLYANQLNFMALSDIEEPVRLKAKIRYSHAGSCCTVRRTGADEICCEFEEPVRAVTPGQAVVLYDGDYVAGGGVITHAMKQPVSLIALDMDGTLFNGQSEISKEDQDAIREASSRGIHVAISTGRPYAGLPVTLLSGLGVSYAITSNGAAVYHLPDRLCIHESAMEPALVCPIIEELQKKSIHMDAFINGDGFSQRSCEGKIDCLDMPTSIKRYIHRTRTFTDDLAAYIRVHNLNVQKMTLNFYPQEDGTFLYRDEVMQILSEHPEITFLSGGYHNLEFTRAGVTKGNGLTLLCSHLGVDIEETLACGDTQNDIDILKTAAIGVAMENALPEVKEIADFVTRSNENSGVAHAIHTFALMGKQSRNGGAVARIAGNIGKYLHPAWGNGKMWLDKQERMIERIREMTREEFATLVGSRPVILDGATGTNLQKAGMPVGVCPEQWILENPGVLIELQERYVEAGTDILFAPTFTASRIKLEEYGLENSLVQMNRELVALSKRAAGGRAYVAGDLTMTGRQLYPLGDLMFEDLVEVYKEQAKVICEAGADLFVVETMMSLQECRAAVIAIREVCDLPIMVSLTYNEDGRTLYGTDPATAVIVLQSLGADAVGLNCSTGPEAMIDPVQQMAEYATIPLLAKPNAGMPELCDGVTVYRTTPEEFASVGAKLVEAGAAIIGGCCGTTPEHIRALKQAVGSMPVHMPLTKKRRMLASERMHVEIRLDGKFMVIGERINPTGKKKLQAELKEGSLSMVRTMATEQEENGAQILDINMGMNGIDEKQMMLDAIYEVTSTVDLPLCIDSSHVDIIEAALRIYPGRALVNSISLEKEKIEYLLPIAKKYGAMFILLPLSDEGLPKDSAEKHGIIREILRRAEAIGMGKEDIVVDGLVATIGANPKAALECFETFSFCKNEMELPTVCGLSNISFGLPERSYVNTAFLTMAIGNGLTMAIANPSQELLMNAAFASDMLLNKEESGIRYIGRMNYLSEKHEGMEHVWVPVGTAKGAAVKGTAGLQAGDTGGAKNSGNTNEAHSAVFTAVLKGNKNHILDDVKHALDAGEKPDDIINGHLIPAINEVGELFDKQKYFLPQLISSANTMKVAIEYLEPMLARSDKEPKATLVVATVEGDIHDIGKNLVVLMLKNYGYHVIDLGKDVPADLIVDTAMKENARVIGLSALMTTTMMRMKDVVELVKERGCTAKVVIGGAAITESFAEEIGADGYSKDAAECVKLVDRLLEEEMNMNGVYPAPGYSQQIPYQASYGYNPYGNQQRIEQPQNYFQPAQTQQIQQPQMTPIGINGKIVPSVENITANDVPMDGSVAFFPKQDMSEIYAKSWNADGTIRTIVFKPVSSDTVSNLSHDTEKLKFDLSDECTGAFMQKFDELFGKIEQIENRLDKLPSGQRKTSQVKKESDPEMQAILNQMVNSPQVQNNPMAKNAMQMYQNGDSNGLKSMAENLCKERGITVDEAKQKVMSMFNHMFNGNASPSLADIAAVTGNGRNNDGMWGGDGWWAIIIFAMIFGWGGFGGNGWGGNGGMGSTASAYTDSAIQRGFDTQAIIGKLDGITNGLCDGFYAQNTAIMNGFHGVDNAICNLGYQTQQGFNTTNVTLMQAQNALQSQMANCCCETREAIQGVNYNMAQNTCALQNTMNSNTRDIIDSQQAGTRAILDYLCQEKISSLQAENNDLRRAASQDRQSALLTTAMSAQTQQIINAVNPAAIPAYVVPNPNAYAYGCGCNTGCSCMFALYFMNRKVEYMDEIKNKFIEAIKKIDFEKLNISELKTLAEITGSVEKMAKKDYSELLMEKFSPDHGFVFSSSDTKTIAELKMAEFTGIALQTVAQGEDVALTETPVCATKCIVHRQGSGIVKLRGLTNQCRARFLVSYSGNIQIPTGGTVEAISLAIAIDGEPLQSTRMIVTPAAVENFFNVSAQAYVDVPRGCCVTVAVQNTSTQAIEVQNSNLIAVREAMDIKRMHEMIEKLSESAECEFAKGIECVDTEEMGKVTDMLKDLAEAMYYRTLTKSMDESDPEQVLDMFERYGDGRRYYDRYRYADGRFAPKGRGTRRGYDEPPYWHMTPEMYHDMEHDRDIDRPHGRMYYTEPTIAADGGMRDRREGKSGMSRRSYMESKELHKGNTPEDKDAKMHDLEKYMKELSEDMAELISDMTPEERTMTKSKLSTLVSKMMTTEYQLVICGFECTAPKIWVLIFEGNFLKKDIDFLVMNKFLEIVYASQIADEEQGGKWREFFEPLMERLKGIVSESVYDELLELLIDCTTDNNRFYAVEGMKLAIGIMDGTYVLKVMNDIQISENKEELTLTTIDIADMMEMPHWQILRKLDGTKKIKGIIQILGDNKIVVTDYFIPSTYLSEQNKEMPCYKVTRMGCEFLANKFNGEKGIVFTARYVKRFHDMEQALKKPQPAITEKDPFEHWEIRWKHETETWFSKNNWKLSIILERFGWTRKFLYHKILVELSDLHNLRAIERAYYASYGYPPEYALDLLDFNIDLNDTATRYINYLLIEEMFVINGIEWKIEFVRGASSKLMRSDSSTSLAVTDWNDRAIYVSDKPKNGYLRKILAHELCHCFCFSYNIHMPIEQEEYLADWISLYGADLIYLLDDLMANIDWRAAMGFMGNLQTKKDDAKSAYIKARNEWAETRTAENIKGDPEKWRALCDRKMDCMRLGVIFMENLRIENNKIYTTTAIGKTDVFEIVTKIPKGFFVWNIGENMGTHEYIPLCQLLHPEDSKCFSINPKTLKAIKVSPEEWEKLEKAGNWGIGNLKQAEKALKSKRRGYTSDRKRAAAELTIEIFRRICKMKRTGLFIIWISGSKNGNAVQEFKRNGINWEYNHFGELTADFYSIGAFEKVGFEHVEGNVYEICRAMLKYKFNVGDALERAGFNMYKAKTTGLLSQETLKKIKNEDTNISAKSLNSLCLILDMQPKDIFIYEETAEDLEQKNKIMDEDMSVFKSYLRRLLQDLKDLKEVLKAKDYEKAEKMVDRLIDDTQKGIEDNMKNTCVNEYGKEINYAVAENLMDDDLREEIHRELAPCSEQEFFDEYAKRHEEKFGEVWELAKENPQYMIKKCVICGKEFKCSPSDKKVTCSSDCRSIRASRTHKGKRNKWSEASKEKLRGKGQTNNLQKGTPAAKKSPKSGRYETNVNAKSWHLISPDGKHYCFRSLNFWLRENCEELFDCAPDSAQFRNITSGLSRVKRCVMGQLPPDQRPGYTYKGWTVAPIGDDITDLAPDRQNKSMSAVEMQEINNNTVDVFKSDIDMYINLWMEERHVEDLCKVSQNRWYNCCKYIYEHVFKVNPKYLKDDNNINNAYDTDKVNEVLDIYIDLCNDYEKVVNIVGFTFFTGIHRDTLNGWVNGVQLGSSGSDICKKIDQMREESLVGLQISGKNNPMCYMPSLNKYCGFNMPGVRDQGARARALTASELPKLGSGNCARLPDKFDNSSPDNGEIVIDNSNNSNPSIMLEMCFNCDYCEEQNGDYFCTNNESEYVGDYVEKEFSCPDWDGSEEDEMRVVSQKKDASYDFDRTEFRTSYECISATFDGRTFVIGKYATPERAAEVFMDMHKAYAPVQVVCTNMDEKKFSALVAESQNAPIRCVEMDDPRMAVTVFDNLVYYMPEKMLILKTVITTFDALAILTFFLLGRDSRNEKDAVAVWGSLIALFLVNIFAMWRMVLYDPIFGIRFLPEILTTVGRIHISRKKHTGETDVLDLDSDAEHQSEKSEHPVMCEFCKDYDNNRIFGANIPIQKCANETNLTNAQIMMNTGDKVPGIVIYSNYCMAKGYFDIAFCPMCGRKLVKKMKHQKEWRTCDRCGAEIEKGILCGNSITKNGILNVTYDLCYKCMEDFERFMKNDCKYQMIVNINNSTYEMNSKQYKAVLDTASNAVTCGIYAVEKNKVAIMLREEYKSKEELKQAVGNYTAKGFKVHWKMKKTRSKIIIKTRKGGYTKIYSNGKWQKRVYNIDFHADCTPLRYPYIKISCEFDKNKTDENGSVIYDPEKEEFAKEHVVARIMGGDIVKISEMNKCIEEMRKCYNFKDDETEIRLVNEINHDDKCVYISTRDENGTTIEMTRYVDELVNVMADLKIFTENIEQEALNQIYTLVKQPAFSDCKIRIMPDVHAGAGCVIGFTADLGEKVIPNIVGVDIGCGMLTTNLGNIDIDFERLDKIIREYVPSGRKVHEEENTPVASDIVEKLHCKEQLKNIDWIKRSCGTLGGGNHFIEVDNDSKNNKYLIIHSGSRNVGKQVAEIYQQMAIDDISGKSNFKQDSEKLIAEYKKCKGEREISKAIKELKQSYKTNTTKIPRELSYLVGKHREMYLHDMKLCQEFAKINRRTIQSIICYYMCWEVTKETERFQTIHNYIEYDTNIVRKGAISAKMGEKVLIPINMRDGCILGIGKGNEDWNYSAPHGAGRTMSRSKAKESILLEEYQKAMDGIFTTSVNTSTIDESPMAYKTMDEIIGNIKDTVEIVDIIKPIYNFKANEMASSSLISTVNGYENYIQVHGIDEQVMDAMAEAARVAILTEKDVEYGLKVSARSKELTEQFIFQSTGGTPWDLEKYSFQNKISYEILDKYYGILLLEAQNKVVDSAFQYLENKREPKERFYMPRRNQFLKIGLTQALQGMIDDKYDILCVSLVPGAGKTTVEKMFHALVAGWFPRDFSLFYSHSGDITRMYYDGVYDIVTNAEEYTWNEIFPDLSVTSTNAKMEQFNVGKYKSFPSVQCTSVGSKNAGKVRASKFLLVDDMIGGIEEAMNPIILDKLWDKYAVDARQRKIQDTDGKNCKEIHIATRWSVHDVIGRIQNMYEGNPRVKVIAVPDVDPVTGESNFEYEFSGFTKEFFEDQQLLMDDISYRCLYKQEPIEREGLLFPEDKIRRYLNLPHGEPEIVTGQCDTKGKGTDYFVLPVLQKYGEDYYCVDCVCDNTADYEMQYENAANVLANNKVQECEFERNAGGDRVAMEVNKRVEKKGWICNITDTPTETNKEARIFQCSNWILQHVIFKDPSLYKPNEPYGVMMSLLKRYSVSGKKQLDDVPDVFSNFALRVTNGNNVAKVEAAVNPFRRYMTTKDYLNQISRLNRMINNKLIELAQLKELACSISSITNEERVMTTPNFDRIGAKQAKIDEMERKIDALVDDYIIKRDQIVSQIDSMEDENVYNVLFSKYIEKKTFEVIATEMNYSWRQTIRLHGIALKKFEQKYGATYLMPQESCFLSGEWKNRIKISSNPFNIQWDDVYLGANYEMNNKSLQDLVKGCYGRKILYTDVETITADNIVNVVGDCIGNFYYNKTIIEYLWRYYKGDQPVLYRVKVQNADITNKIVENHAYEIVQFKVGQTYGEPIQFISRKDDDEINRAVDALNDYLVDANKQEKDIKAGEWQSATGTSFKAVRFSNGEIPFQIVAPTPMNTCVIYNRSTEEPVIAVQELKDEDGRWYKLCYTDNYSCKIQNGVVSEWKLHAFGSIPIVEFPNNHERISDIELVIGILDAINNMQSNRMDGIEQFVQYWVKFVNCEIDQKTFEEMKMSHALTVKSNNKDNKADVEIMTQELNQSQCQVAKDDLWDNALAILAIPNRESQNSGGDTQGAVSLRAGWDFSKTRAKLKDPIVKSAEKRLAKVVLNVIRVKENDLKLSMRDFDVQINHSPQDNMYTKSQTLYQLLECGIHPLIAIKTVGLWGDAEKTFLLSKPYIDVLWKTIDDAEEQEQKAQEIVNQLNKQQNKTATEMKREELIAMGISEENVEKIIADYGSAVQREQAKAAELKAKADSADELQKKLDEMEAGNLTELEKANKALETANQQIADMQKKNAIRDQREALMEKLKINAEQAKTVVKDDGSLDYDALGKITSEKEAAAAQAKEQEIANNSENPGGGTAGGENKKTADVENAESISFGEPAKNAEAKDHYVLMGKPIERDFTQSKGILKFFPYEGAACIVPQTMVPSADANGKKIAKAGTPFPSNDESCKGYLLEDVDVTMGDAPGTYVYQGSIDNAKVTANGVTVEATAKAATPRVTFFDMALPLSEAFTARSLGVMWNNYEKTLGSAPYLGRQKFGTRKQDSLELRFIKGKNGLPVSLKASNFDAQAELRDVGGFSDIQNEMPFYRESYMVTEREEQEYANYQSAENSNMANQVLREISKKPMMLIEGARVVPERQIWQLLAPSDGIPRVQVTIGGKSYYVDYTSDNGVAHKRDHYKDISGSDTDKWSASETATPLDDLIEIKREFAKKTGYSLARFSMNTETWEMVLKAEDTKKQVLGITAYNGGIRLQQGQVTEYLRGYGIEIEVYDKLYIDPADGATKYFIPTGVISAQASGVYLGDYVFGKTPEERSGSLTDGNLSIVETGISVYTYATNHPINTHCVVSMIGLPTFEGMDSVVVMKVAMIAEYTVKRNGRWYKSGDEIPDIVSGEKSSGGYTKTEINRMSTADLQALAAEHGIEGAGEISGAELKRILIEQFGLMDEYTTLEQVKIRLKQFHIETVTDEDGVTSDVVVFDQKEDNPYIEQLIKQARNEVVSKRNYPESYTDEKISEDLKQFEDVIVNLAVYDHSQAGEAYMASYSENGVSRSWKDRESLFVGVFPFVKALMTIEISTAIIISVLSLGFSVFMGLKSNKRTDNTELEERVRENTRINMKLDAISNNTTEIKNEVSEMRKEINSHDNRIIKVEESVKSAHHRIDGIETRLNDEKEVMDIIQAVIANMTIILAIIGALAFVVSVVTQVIKGVGVFSKVPTDILVFVLSIGITVAAFVAYMQYIQTTILWYMILAAIIAGFIVAFVAMYGWEKLSELWKRFGKDVKMLEINKQKMNYSLQSGKVPVYVTDEDGNIEYSSYTDSDGNVIYYLDEDGNKIPKTTGEYTTGYEKPVVFYSSISNKLSEALIKEFGVDNSTNFVQIVEDKGKLPLSVGSLVWKRSDVRYKDEENTIVDENSADYIVKGVADEGLTVDLFLLQKNVKMGKKVITMSLSEKSIQNAIRELRAYQNRLTYKCQLLAEKLAEKGVEIARVQIADLDAIFTSELISSVHAEYEGSTKGGGIWAVIAGTDHAAFVEFGTGIVGQQSPYPGKLPEGVSWQYASGKTIHQISDGRYGWFYQDDNGDWWFTEGMPSRPFMYLTANELRQIVTQTAKEVFGMAGNQWVFDLETNIFSNVVTIAKPKLQKKYKSMNFETAFTTVEKNLDKDPVFPTIYIHEMPGLERGADLEGTSVNAVQETIQVDVITNTKQSDAKGIMAILADAFKQMRFQITAMPEFKNDSEKKFRSVARFRRIIGANDRLMMAAAGLSTLGITFGYGTEATAGTKPTSFKQLTRINSIGGINIEPEQIDASALEDAITRYVKGRADTGGSFPITVNLTDATKEEWEALITAYKALTDGKRMWFETIIPGFADAFFVVAQPPEQIPQPEIGQNELLTVEMNLTIEEYKGMDTAVAFTPGEMTKLKFGEKELQIKFGYEATVKSGIIKKVAKLNQMEDMEAVDEILLFLPELILVGAQKFHKEELGYNPDNEEEKEQQLGKVYAMLDDYFDGEDADVQELYNALLTELLENGFLSKLLKAEQKEAEKKTPRKKMWMWFGTYGLSAVSVAVEHCLAGKKAKSKYIDKPITEHSLLNDSEMTEEEIQKQRELFVAKLKIKQSNYELSHPKKEEVPHENMKIKGIDVSGYNGNINWSKVAENGVEFAILKVIRKDLQPDKYFEANWTGATEAGVPVQGVYNYSYATNAEKAQIDAQRVIEVLAGRNVMVWLDVEDKCQQNIGDKIVSIINEYQKIIEAAGCKFGVYTGLSFYNSYIKPYLEHIDCPFWVARYPSSTPMMITADAPEDKKPDILHELYGWQYSSKGFVAGVSGCVDLNELYVAVDTVNVMPEPENTLHKVGEEITVSSYYKSSTAGIGDAIIKYASGTITRIKAGTHNPYCFSKNGVAVGWCNDGDIRSTDASVQSTDKKTTYTVRRGDTLSKIAKENNVTVAKLQKDNGIKNPNKIYVGQKILIQMSDAATGFKGAKSKEITSLATALNKFSNVDTSSFYGISAAMKNLAAGMKDTKMIDASGILNTASALSKMGGKLATVGTDNLVKIKDDLAYFVKGMNSVGALNFDTTGLTNLIGSISRLGGKISTQATANLPQISAQLQNFVRQMNKIGELKFDMTNMSSLVTSISRLGSVASGRAVNNIPLLADNLKYLFETLSKAPNVSANIIRMTEALANLAKTGASSGRAATSLGKSLNIFSGSANKAKSSSFSLASAFGKLYASYWLLFRAFSKIKDAIDISSSLTEVENVVRTTFGNYEKLIQDFSKTSIQDFGMSELTAKQVASRFQAMGTAMGFSQGKMADMSLQLTKLTADMASFYDMEQSDVARNLQAVFTGETEPLRKYGLDLTQATLKEWAMKQGLDADISSMTQAEKTMLRYQYVMANTAAAQGDFARTADTWANQVRILKQSFEQLASIIGGALINAFKPFVKTLNAVMQKVIDFATTVTNALGSIFGWKFEISAGGLADDWSDAAGSAADIADSTGQAAKNVEKMNKGLRAFDELNLITTPDNSSGSGSVGSGGGGASGGGASGGLVQVDTIFKDYESQIRSLRELGAYISDALSDAMESIDWDRIYSKARNFGKGLADFLNGLITPRLFGDVGMTIASALNTAIYAALSFGEEFDWTNLGDSIAAGVNRFFETFDFSSLGRTINTWVHGIYDTITTAIGNIKWSEVWDGVTDFLSEIDLETISLIIGAFALKYAGKILTGKILKETIGKLISEKFVAAFGQESVKSILSYVVPISLSVAVGALTFTIGKDSIKKDAENLVKAYKDGGFLQYLQESLKQLINPFEWINAYGGGILSQKGILDRYSDGVDLNIKMPKKEDYASLDEYQKALNDFNNNVPDSLKVPSSFDLKAWIDEWKQINGLDNVDLRAEVVLPNLKEKISGFKDDVKEWWGLDVELPVRNKLTTTLEDVSSWWEDVKEYWGEKKLSIQTEIGEIKGKIEEKWNEASEYIQENILPWFTKDHWLEIGNGIKEGLSTKWEEFSTWWSDTGIAVWWNEKVSPWFTEDTWKNLGESIRKGLSKKWEEFTGWWENTGFYKWWNQDVAPKFTTDKWTFSGISDGLKNAWNNAIAAVKHIWNGFANWMNSKLSFSWDAVNIAGKQIVGAGSINLGKIPTFAAGGFPSQYSMFMAGENGRAEMLGTVGGKTAVAGGQEITGIRDAVYSTAQQEMELLRQQNQLLQGILEKEFGITSEQIGKSARNYAKDYFNRTGREAYIFMALIKCPECGKEISDKAEMCINCGFPLKQHENNEMSAGKSKFYKSYEQENENDRGWERPKEPEITGVGKLFLRNSVERSQNTGFNGIYKYTLFGEKKEVYCPRCGSENCSHYTEQKFVPGKTKTRYTANLNPFKPFTLVNKKEKILRKDQTYEINKIICNDCGYTFIMENRESESELNECKKKLNKAHQTIEELKIKMTQDKKNYKWEIRELNKEKDALKAHNTDLFNRESNALIRADDLEKENIALKKEKKKLEIKIEKLEKENENLLKKKDECTRDADWERLGKAGIMRFFSFLNSIGGIYGKTGNQDYIWEHGSNSHVGENFDMKKYKPIDWSKCPESRTPIGNPNNCVVADILPDGKTEILFLSHDNGVHICKSEKTTMAYSGWLLKIGNYTVPMSFMKPETYSPYVNMQDLDDYTDANGYLHRNAVELKALKVEFETPAMLTNTEFNTIISKIRQQFTNATGRACYITAYIPEYDDYVTQYGYMADFQPTIYGTYGGQIHYNSVRLAFIGGVYDGMVDYQYSSLFLKDSVDKQLNIVSDDGKINITNTELHQEKFELTESLCSESELTFGACEAGMIKFTVSNVFLPMKGKWLTAKMTLDGHKDKPFQIGRYKVYSDTPTADRTCRDVVAYDALYDILSSDVTDWYNQILPQKDSKVTLKQFRDSFFNHFGVEQEEVSLVNDEMIIEKTVEVTASSSGSSGTAETSTIGEAMSGKEVLSCILEINGCMGNIGRYGKFRYVYLTQEIQGLYPANDLYPADDLYPRNPKSTSISKSQYISAQYEDYIVRTIDKLQIREKENDIGVIVGDGGNTYVIEGNFLVYGKGTKELNEIGEKTLSKIKGIIYRPFSADCKGNPCLEAGDAVRLATKYELIETYILKRTLKGIQALRDDLEADGEEYRTSKVNGIQRSILQLKGKSNTLERSIEETKSTIVDVEKGLQSQITQTATEIRSEVKNTTDGLSSRITQNASSITAEVNRATNAEGTLSSKITQTAESITAEVKRATEKEGQLAAAIQINAEGITSKVSRDSVVSEINQSAEGLKIRADLLELRGSVEMTGGYVHIDATESTDNLVELKREGTLVQMGTDGLKSVADTRELTASYSAVAVRDTSANTIAQMLSTGKGISSYGWESYSDKRLKHGIESLDREKSAALIQSLRPCRFIYNYDAAGHYRHGLIAQEVLTAIGDEDWAICSENPDPDGNTYYALDKTELIADLIAAVQLQQEALEELKKKVEMVNAKIREFENDIINFINASVDIPIEVKHLVLKDILHQVEAEANRHVIAEREQMQENLKKESEDHEMNKAYKRINWENYPSDATPLNEANLNNLDSATDTIDDRVITLDTTKVAKTEVATLVSDVTFEESTGIITITKKNGSRVTIDTQMEKIAVNFTYNPTTQQIILALIDGTKQYIDLSTLITQYEFLDTDTVAFTIGTDGKVSAIVKEGSIEEKHLEPNYLAKIKVEAAKAETSQADAAASATKAESYAVGGTGSREGEDTDNAAYYYRQAKSISESFAGALRPMGTVAFANLPALTDATAGDMYNISDEFTTTDDFKEGSGNAVPAGANIYKTSDGKWDVLAGTPVTGVKGAKENVYRRGNVSLSAANIGAVATGGDTASNVASFTSSDDETASSWTSVVTLTSGEKHSSIFAKVSQMFKNVRYLYKMLGTTDISGIGGGTVTGAIVSQNIILGTKGGSIGYASDCSLESAVNQFISDMAPYVPYLIHGDNIGGVPVDGTPNDVTIEVIVLNKLTNAYRIVLYNNKGTDIHTICRIDGGWKSWVQIAMGEDKEKNVADFSEEEYKKYIFEMISKMDKTRLRFYYRLISGMEKERDMYEIFLKLLEEKGVSAYKVGKATGIAGSTFTDWKTGRSAPKQDKLQKIADYFGVTLDYLMTGEEQNSPYSDDMADLFVEISRSNDVNRIKRLLSYYMNLNEREKDSVDSIVESLSNKDNPKKNGMYQKFEQLVKARGISTYRVAKDIGLAPTVFSDWKSGKSKPKTDKLKKIADYFGVTIEYFLEMSHSIEEVKDTLYQQIETLAEESKKTSDTETKIRIAGEIDRIAETIIGIDADMDELVKVNFDTQTVSARELHEQLHIGTRFNDWFPRMTEYGFVEGTDFYSKMSKTDNGGRPSTDYEISVDMAKQICMIQRTPEGKAVRQYLIDLEKAWNTPEQVFARALKMADEKINSLKEINTSLIAENKRMKPKEIFADAVATSHTSILIGDLAKLICQNGYQIGQKRLFEWLRENNFLIKSGSSKNMPQQRYVEQGLFEVKESNVQNPDGSVRITRTTKVTGKGQIYFVNKFLERGCADEEMDKQTNIALRKTLDQIGASHSLKGYTYTIRAIEKCLDDRDALRCVMKEIYAKIAEENGTTASKVERNIRNLIEVTWINGNVNAINEIFGYTVSTKKGKPTNSEFIAVITDFVSLHGQEIESDSYKWREMKKLAMVIEFVGAAIFFLCMCADATENPIVAIPTIISLLLLYAGSRIEGGWQDAEEIVEDHDYYVDGDDTDDGITYITYDSNGTEQYMDFKMAIIEHESSGQADVENGGCKGLMQIYEKYHRDRMERLGVEDLYDPYGNILVGCDYLAELFEKYEGDMSTVLMIYSGTSDALTRTYENRTEYAKSIMNRTVELERLHEETESSEPTKAEMNEITNNKVKLTGTVVSEPEFIYEVYGEQFFNLFLEVKRISGVADIVPLTISERLFNLEDKFTGTVVRVSGQFRSFNKHEENKNRLVLSVFVREIERVVNDYDEENEIEIDGFVCKDPVYRKTPLGREIADILFAVNRSYGKSDYIPCIVWGRNAVYTSGLPVGTHLKLTGRIQSRGYVKMYEDGTEEQRTAYEVSVSKINVLEEENMAENTVTISVEEYADLVACRTKVHTACAIIANEHQRDIELMGKKGTTIDSKIIESALGYVDDEACFEEALKKYKEWKEKENETENMKLKIRSLHMENFKGIKSLDVNFSNKTSIKGQNAAGKTTIFDAFTWLLFNKNSAGEEKFNVRPLNEGIRVDNVEIKVSAILDVDGKEVELSKTQKQNWVKKRGTDTAVLQGNVNSFEIDGYPKSEADFKAYVSELAQSEEMFKMLTNPQYFSSLKWKDQRDILMKLVSEVSDVELAQTDAKYAPLLSELEKAPSTDDIRAKFSKALNEWKKKQAEIPVRIDEAMKSKVDIDVAEQELAKTDLETKIADIDAKIKDSDGVMMELGREEMQLQFDMSGIMQIMNRDLTNRRSEIEAELRDLQNEIKRFADTIALKERRVSENETVISNADSERKRLGEEYNAETAKAFDEFPYLFDESKWVFDENSTVCSLCGQKLPEDKIEQLKADFESRKRKAKSDAEEKLKSEKIRFDTEKRTALNRLVDIGTERKNLITKLRDENAKAKEEIKSLKEQEQEDIAKKEKLCQQLSSIPEIADYLHNEEYVGLKARHDEILAEIERMNANGEDVAVEALNHEKKELQERLYDVNKIIAKASMNVEIDERISELQTEQKEIGQKVADQEHILYLLEEFIRFKLNKVSESINSHFKTVKFKLFDMQLNGGMKDCCECTVGGVPYSSLNSGHKIVAGLDIIRSLSELYGVSAPIFVDNAESLTSEQTMRSQLILLIAKKPQYMDEHGEVHDIDDNYDPTIHKLVYDGSLKVEGVMGESIKTYKGFNKNMTYRGFQYEEGKEYEEEIVEVCDHGFHACEYPLDCLNYYYPNESVYHEVEQSGEIQKHNDDTKVASAKIKIGAEISIAGLVKAAIEYTVKRVKKDAESDEKHGASSETGDYGASSETGDYGASSATGDYGASSATGDYGASSMAIFHFTVKIVGRSKGKSVISASAYLNGDVMKNEETGRISYYTSKKEVVYTSLMMCENAPPEWLHVPEENIKRFQQSIRYKRADDKDAALEKFKITFQKQRLWNEVLKIEKNADAQLGRSFEFSLPKEWSRQEQIDYTTEYIQKTFVVESVLGCPIEEEDLPKLIGFLKRQETNGKFFSKAMQKEPLTDMEEVERTSLNVHFKAPTDDYVKMFEQMEQDGVISTRGLKPDAVKYGELVFDVNSAYFYNHGGYEFAKQFYADAYKAAAEIVGGEQYILSAVMHADERNRAMSEALGEDVYHYHLHVVYIPVVEKQILWSKRCKDEALRGTVKEVITQVSRSKKWESKPVLEALRGTVKEVITQVSRSKKWESKPVLDEDGNPMLNARGKKILRSSYSVLQDDFFHFMRVAGYTDLERGERGSTEEHLTVTQFKVQAEQQRLEAVTGQVTQAEQSLAHAKAATEKQKKKLEALKKETQAAKSVAMTAHEIESMGKKNPITGNVTMTADECRTLKDYAVSSFAEKSEKLKYKQKFEQADKNAKIWKDRFEKLNKDYEELKQKAQPFLDAIEIASEKVWAFINAILARGKELYEHKHPARNRGQDMEIMKKTVDEINKMIMEDAPMEEINDAIGYIDICSCFDPIFEPPIDFLEECRKRWEAAQSSFCKTIECKIGNTWYVIETECDGNEPLTDKVKRLIFSDKGVICMLDQQKITILYCRLSNEDAQEGESNSIANQREYLTRYARDHGYTNLKILVDDGYTGTNFNRPGVQEGFELVKQGLVGCWLVKDLSRFGRDYLTVGQYTDIIFPSYDVRFIAINDGVDSNRGDSEGFAAIRNLFNEWYPRDTSKKVRVSLRQRGTSGKHMGKPPYGYRCDPEDKDHWILDEEAAPVVKLIFDLCIDGKGPEQIARILEEKQILTAKALYAKRKKKPMPERPYHWGNQSIVGILERQEYTGCTCNFKTYSKSYKLKKRIPNEPENMFYLPDTQEAIVSQAQFDRVQELRKNKRRPAKAERQGLFSGLLFCADCGGKLHFATSKSFEGKQDHYVCNNYKSNRGTCTAHYIREDVLREIVLERIRAVNEYIRSDVDGFQEEWLQCRRTDQDRSIRDDKKKLEQAKKRLADLDVIIARLYEDYVLGNLNQDRYRKMSADYEAEQERLKLEIEVIEEWVEQREEMNDGLDAFIALTQKYVDVEELTQTIVNEYIKKIIVYAPDKSSGKRKQKVKIFFNFVDDVDIPVISEPIITQTTYEHRKTAMAKGKKRPAELPEYGTVMMKGVQYYRTRITDADGKRVAIYGLTREELYDRVEDAQKKIAEVVFHRENPTVEEYCEKWLLMRSGTVRTNTLEGYERMVNRYIVGSIGQMYMDEVTTDDLRLLMVPLSKGSSGMYGQLNMLIKNIFNSAEESKVIKENPSKTICARGGKPAKRREALTDEQTAILLDSIRELPPYVFVMIGLYAGLRREEILGLKWDCVFLDEKTPYISVRRAWHVEGGAPVVNTLLKTPAAKRDVPIPKCLVACLKEAKEKTESEYVISNSKGTVLTETQFVRVWKYITVRSTAERCYYTYVNGQSIKHRIKPRLGEHQPNNPKLVYTMDFKVTPHMLRHTYITNLIYKGVDPKTVQYLAGHENSKTTMDIYAKVKYNKPEELSSVVNAAFGLRMGLRVNQKKLGAGMVKNPCPFYIHSTSLKEVVYAMIIRVATPNVMAARRMMLPDYGTVSMKGTQYYRTRVTDQQGRRVSLYARTREELYQKEQEAIQQIENKTYRRSTPTVEEYCEKWLLMQSAQIRMTTLIDYTSKVKNYIIKPLGDMHLGDVTADDIRLALLAASKKSASVYKSVSVIYKCIFTAAMESKIIDENPTIYLKKNVGGIPQKERLPLTDEQVDKLLDAIYGLPPYVFVMLGLYAGLRREEILGLQWDSVYLDCEAPYLTVRRAWHTEHNRPVILTELKTKAAHRNVPLPDNLLECLKEAKKTSTSDYVVANRDGDPLSYTQFKRLWQYIVTRTTKERCYYRYEDGKRVKHTVKPVLGQKAAHNGNVVYSLDFEVTPHQLRHTYITNLIHASVDPKTVQYLAGHESSKITMDIYAKVKYNRPEQLAGVLEDAFASWDMDKLITRKEAASILGISVKTLDAARTDGLISYVQYVENGCVYFTEVGIQEYIAKCTHRAKPMERAATYRKPRSFRRMKENWVYRRGDLYLANLGVPVGSKQGGVRPVVVLQNDVGNYYSPTITIAPLTSKIEKKRKQPTHFFLRKAKGLAKPSMVLAEQLDTCDKICVIRYLGRVSKGQMRGIDEAVRIQLGYYIPEQSEKKRQGKCRKDGEEGDGMELAKYKACICEGSAEEAIIDILVDNDLLIFNREEMLEERVIRCRSAKRFEERYLRKGFDEQISVIRILDSRREEFRLSKAYEQKIDVVNVITAPEIEMLIIHAEGAYDQFKRSGKKPSEFCKTNLRMHDVKSYDFVKQYFSNPQLLVKAIKEYRRTANIPKGEYSLSDLLRMKILRITAQGLPLFKKDLDICFYTQQRVCEEDKDNLYRLTDNYYLHSACAFIGINASGKTSVLKVISLALNIVKNEPINHVEAKSILGGAKNVTIRTYFYDKRSYVCCLETVIAAKKSKTGEYVYSILSESLWEKPIATVKSKKYLTDFTGMKPVEQRNSDEAYLSDDVSFVIAHNKKANDTVEIFSLLSYTNVNVLPFTEDIPLEVIAFLDPTIEKLCFEQTEGKTFIHLKFKDEEEIILNNAADLEQYLSSGTIKGIITFSMVKEVLHSGGYLLVDEIENHFNKEIVTTLVRFFMDSRLNKNGGTLIFTTHYPELLDEYDRNDGICIVRNRNGITAENLSYILKRNDIKKSDAYQSGFLEGTTPAYEAYMRLKKSLAASINMTLHAFHAVERVSNHRACHIERILFSVKNKSENKNGKSVDIFMYFDAKEFGKRLHDVRTSRGITQEELAVRLGLASKQHVSRMENGERSCSIDLLIELSCILHVSTDYLLMGSEPSKEEVKNDLLSIISELFTIAKKIMPHETELWDTHVLFYRHRIFSSPSCGSIFDLPSIRFCTGCAEGETYVFMSRNIRVSEPSAEMQIKIIRAKDAIASQKPRIVRCPYCRHNSIIVFEDTRGHVQTKCKACGRETVFNVLEMRRLRRLQLYYSSLNGMILSQKKIEEIAVAVIRDFQKSFFGSEADDPARFALPTPIDQFASDYLNLKVSFQKLSSDGSIYGLTAYVDTEYQIEVDGSQRSIFLKTNDVVLDKSFIEPANIRKLCGKRRFTLAHECAHQILFQLDADDRKIACHKRPEVRGNGSRILRTQEDWNEWQANSLGAAILMPQSEVDRAMWFINSRKPLTCYGWRFYNKDQVKIDTFCGVFGVSRSAAAIRLEQLGYLNRKKDYEYRDPLEVWPMSEQKCRKVYVPVNLDVDAEGNIRPRLIRWVDGRVYEIDRLKHKCRAASTKVGGCGIRYTVMIGGHESFLYNEDEKWFVEAKEPCLMQRVILHCDMNNFYASVECMLNPELKNKPVAVCGSVEERHGIVLAKNYAAKAFGVSTGEAIWQAKQKCQDLVIVEPHYEQYMKFSKLAREIYGRYTDQIEPYGMDECWLDVTGSGCMGTGFEIADEIRRTVKFELGLTISAGVSFNKIFAKLGSDMKKPDAITCIEADSFREKIWCHPASDLLGVGRATEKVLSSYGIHTIGELAATSDDFLKCRLGKNGLVIKKYANGLDDSPVMRSDYVSPVKSIGHGITTMQDLENNAEVWCIILELVQEIGTKLRIHKKKAGGIAISIRNNELFTKEWQCRISIPTQSPTYLAKTAFALFDKNYQWEHPIRSVTARAINLFEEDCPIQYDLFTDMKSLDRQERLDAAIEQIRFRFGKDAIKNGVLFQKSKMPTERKVDLLMPTGMIGMVFKERLKEKRTEANLTQVELAEKAGVTARTIQNYELGSRKPSNMVTIQKIADALNTTTEYLLGSSGTYVVEAHEKGGAKAAKDIEELVSEVTGMFAGGELSEDAIEGAYKALTDAYWIAKENNKKYAPKTRRKKSDQMMNAEQLSRVGEKLVKRCGSRDPFEIARQLGINVMRCENFGSLKGMYRVIKRNRFIFLNNSLDENMLRIVCAHELGHDQLHRNMAKTTPIHEFMLYDMKSKPEYEANIVAAEILMDSDEVLRYIYEYGYTAEQIASAMSTDINLVALKVAHLATLGYNLHALEHKSNFLKMAKKKKLTKAERKEARLRKGKQWLLTYTGSPKKMNKHYRERFHVDAVTAAKDLQELGVNYTQEQLDQIKQAEEQRLRQRRMEREAKERERLGELYEDCDGRFAFIAGYTDGGAPYGVMWEEVGIDPGLPFEEKVKLYHMQMLGLMQCGELSEAKLFATGCCKKPHIKQRGSDGVTRQELFTWIRKQYGTEPEYPWHDWNAVLRHNDNNKWYGVVLEVSADKLGLTEAGIIDVLNVKSDPLLIGSLRGQDGYFPAYHMNKEKWLSIQLGKPELDDAIKDLLSLSYELTAPKKRKPKSSAKTPGDFANGKEKETDEGMQGLANNKPDFRIQVKSLFGTEEKRFEVVGGDKKRPATKKKSDLGWIDRLEEIDAALDDFMSTTLHSFMDIFETTIEDGDTSVQLNKIVIPLIQRDYAQGRIDKDINRVRSRFLQALYRAVTGEPITLDFVYGDIDEEGTMTPLDGQQRLTTLFLLHWYAAKKEKISDDKYAFLSRFSYETRYSARYFCAELVKFMPSFETTLSADIKNQAWFPFDWKDDPTISSMLVMLDAIDERFKDVPDIWEQLENKAITFYFLPIRDMGLTDELYIKMNSRGKPLTVFEHFKAELEREIRALDEKNGQNTADRIVGKIDKSWTDLLWKYRSSGSSDADDNIIDDEFLRYFKFVCDIICYRNGQSPQGYSSDVFDLLHLYFSADDEKAVANIATLESFFDCWCKIKGYNNPTEFLESFMSYTHARGKIVVDSRYKIDVFEDCLHFYSDKSGRIRQFPLNRIVLLYAITIYLQHQSEVTYSDFVRRIRIVNNLIQNSEDEVSDRQDRNRIPAILQAVDAIILTGVIDDSIEINFNVNQIQEEKEKIEFLMQNPDRTDEVFELEDHNMLKGQIGIIGLDNLSLGSRFSSLFTCSWDKIDCALMALGNYGQQERNKWRYQFASKSLQYAWDELFHKSANAGFENTHTILVELLKSKESFDDGILDRIISAFLAQCEKDNLYPWNYYYVKYPVFRPGSYGKMSNDDVVNKPYMFSVMQTKTQWSQNTYMPYLKEADDDHLSRDEMGQYLVYDDVYIVCENNSYGVYRNDDDSLTDTVTISQNEAGIDTEDRIIKLKKYIANMKMGNNIILETKFVADIRGSFYIPSYQRGYRWSETEVVRLLDDIYQNGKKNYCLQPVVVRKKEDRYELIDGQQRLTTLYLIYKYMKNVNPFFNEPAFTLSYQTRDQSEEFLKTLDMTKQDDNIDFWFIAKAYNTIKEWFEQDLQIRVMHIFEYLKEDVKIIWYEVGESEDAISLFTRLNIGKIPLTSAELVKAMFLSRDNAENMRREKQEEISLQWDGIERELHNESLWFFLTNSVKGEYQTRIDLVLDLIAGKEESTREKYYTFFRFDELRKEVSLDDIWKKIYQTFLTLKGWYEDHDLYHRIGYLITSGTSLHKIFALSKDKKKSEFNESLDELIKKSVAISGNYAELSYEKPLDYKRISTLLLLFNIESVRRSDGHAQRFPFDQFKHHKGSNVTWSLEHIHAQQSEGMKTQDVWKKWLELHIPSVESIGGEHSELIDEMQGAINADKLERTVFESIQQKVLGLLSVSGNTEYMHSIANLALLNTADNAALNNSTFDVKRNDIIQMDKKGQYIPFCTKMVFLKYYTPSAENQLHFWGQADRIAYIKAINDVLSDYIEPIVLEKEETKMELQEQFAAFVRQSDKSKLLISRLKEFILMGYRGHGKMMRIRELLAVESIDLNAKAANKKEALDHAVDLMARSGKIGNVETYRNGVYAREEEGTTGIGEGIAIPHCKSDVVKAPGLAAMRVAGGVDFQSLDGEKADLIFLIAAPNTKDNVHLDVLSKLSVLLMDEKFTNDLRNAKSVEEFLHVIDVAESAKDAEESKEVPAKAETKGGRLILAVTGCPTGIAHTYMAAESLEKKAAELGCRIKVETRGSGGAKNVLTREEIAEADCIIVAADTQVPMERFDGKPVIECKVADGISKSEELIKRAINGDAATYHASNKEAANRNDDEKDSVGHQIYKHLMNGVSHMLPFVVGGGILIALAFLIDGFSVDLNSLPMDQRSNFGTITPVAAMFKSIGGAAFGFMLPILAGFIAMSIADRPGLAVGFVGGAIAANGTSGFLGALVAGFLAGYVVLLLKKICSKMPESLEGMKPMLIYPVLGIFITGVIMTYVVEPPIGALNTLINNGLNGLNGASAILLGALLGGMMSVDMGGPVNKAAYVFGTASIAAGNYNIMAAVMVGGMVPPIAIAIATLVFKNKFTAEERKAGPTNFVMGLSFITEGAIPFAASDPLHVLPSCMVGSAVAGALSMAFNCTLMAPHGGIFVFPTVGNPFMYLVALAIGSVVSAVLLGVLKKNVAMIYTLTFNPSLDYIVTVPKFTCGMVNRTMEEIIFPGGKGINVSMVLKNLGFENTALGFYAGFTGMELKRLVADKGIHADFIPVEKGMTRINVKLRSEQESEINGQGPAIAASDIDKLYEKLDALQDGDILVMAGSIPDVMPQTMYMDIMKHLQGRNLKIVVDATRDLLANVLPFHPFLIKPNNHELGEIFGVEIREKEDAVTYAKKLQERGARNVLISMAGDGAVLVAEDGSVYQAEAPKGKLINSVGAGDSMVAGFLAGYLEHGTYEKAFQMGVCTGSASAFSEELATKAEVLDLLEKNQNLFMLTEERFAKILSILEHMGSVTVQQLMTELDASESTVRRDLNTLDANGQLVKVHGGAILKNTVYSTIDDEVVHRKEQNREAKDKIARYAAGLITAEDFVYIDAGTTTERMIDYIANRQAVFVTNAIGHAKKLAEHGCKVYILGGEFKAVTEAIVGEEAVFTLDKYNFTKGFWGANGVSRQRGFSTPELKEAMVKRKSMENCRDCYILADESKFSQISSVTFAPFEKATVITTELKLEIYKDCSNIINIEMNFYFTRHGETEWNVKKKIQGTTDIPLDEKGIQQAKRLAETLLEKQRDGELHLDRVYTSPQLRAAETARFSAEALGIDCIRLWDLREMDLGDWEGRNWDEIRETEAERHHIWDTHRRFCHTPGGECYNEVLRRTLAALEQILTCEKDDVLVVTHSAVLMALRCYLANRPFDVMREYRTRNTELVWVTEEEIREVICRYEKAMMADENKVFDVEIITPDRVFFTGTATMIEFNTAAGELGVYARHIPLTTVLAPGVVTIHKQGEEDIIAAVHSGFAEILPEKVTLLAEIAEWPNEIDKARAEAAKARAEERLANRTEAIDVKRAEFALRKALVRIDIARMANNRGSQDCPGKITQIIGAVLDIKFPEGALPEINDAIRVPLKNGGELVVEASQHLGDDTVRCIAMGPTDGLVRGMEAIATGGPISVPVGENTLGRMFNVLGNPIDEIDTPKDVEHWPIHRPAPAFEDQATSQEMLETGIKVVDLLCPYQKGGKIGLFGGAGVGKTVLIQELIHNIATEHGGYSVFTGVGERTREGNDLYYEMKESGVIDKTTMVFGQMNEPPGARMRVALTGLTMAEYFRDKGGKDVLLFIDNIFRFTQAGSEVSALLGRMPSAVGYQPTLQTEMGALQERITSTKNGSITSVQAVYVPADDLTDPAPATTFAHLDATTVLDRSIVELGIYPAVDPLGSTSRILDPRIVGQEHFEVARGVQEILQKYKELQDIIAILGMDELSEDDKLVVNRARKIQRFLSQPFSVATQFTGLEGKYVPITETVRGFKEILEGKHDDIPESYFLNAGTIDEVREKYNNAQMASMRDIKRRKSSIQSTQQITKAMKLVSTVKLQKAKNRAEQTNPYFQYMYRTVTSMLAKSGTINHPYLKKGESDKKAVVVITSNRGLAGGYNSNIVKLVTGSEDITTENARVYAIGNKGREALERKGYEIAADGSSIMESPSYEDAAELCKQILKAYTDGEIGEIYLAYTHFKNTVSHEPKLIKLLPVEFDEDEMREAADEKVLMNYEPNEEEALDMIIPKYVTSLFYGALVEAVASENGARMQAMDSATSNAEDMISDLTLKFNRARQGSITQELTEIIAGASAISMNLKPEEISSVIKEQIKRYAAQLEVADVGTVIQVADGIARIHGLDNAMQGELLEFPGEVYGMVLNLEEDNVGAVLLGSQKNINEGDTVKTTGRVVEVPVGDAMLGRVVNALGQPIDGKGPIQTSKYRQIERVASGVISRKSVDTPLQTGIKAIDSMVPIGRGQRELIIGDRQTGKTAIALDTIINQKGQNVKCIYVAIGQKASTVASIVKTLEEFGAMSYTTIVASTASELAPLQYIAPYAGCAIGEEWMENGQDVLVVYDDLSKHAAAYRTLSLLLKRPPGREAYPGDVFYLHSRLLERAARLSDKLGGGSLTALPIIETQAGDVSAYIPTNVISITDGQIYLETEMFNAGFRPAINAGLSVSRVGGSAQIKAMKKIAAPIRTELAQYRELAAFAQFGSELDADTTEKLTQGERIKEILKQPQYQPMPVEKQVMIIYAATNKYLMDIPVADILPFEKALFEYVDTKYPEVPEAIRTEKVISEETEAKLIKAITECKEEFTKMAKLVSKVYGDALFEVAVESGRLDEIWEQTRAMQTALEENPELFALMRHPKIVKEEKVKIIESIFTGEVCAELVGLLRMIVEKDHFAQIGKVLAYFDDQVKEYKSIGTAYVTTAMELSDAQKAAVVKRLLETTKYVTFEMHYEVDSAIIGGMMIRIGDRVVDSTVRTKLYDLTRELSKIQLKAGECAPMEEMTRLFNLDFQLLHDVVLMAIAVFFLFMMMSKLLFNPVRKMLADRREKIAGELSDAANDKKDAAALKADYEARLKNIDKEAEQILSEARQKAQKNAARIESEAKEEAARIIQRANEEAELSKKRAMDDVKQEMITVASMMAAKVVAANIDASVQDALVEETLKEMGDSTWQSMNITGEDLILACSAIGAGLAVIAGIGPGIGQGIAAGHAAAAVGRNPGAKGDIMSTMLLGQAVAETTGLYGLLIAMLLLFVKPLVMNNAILMSSGADNIDFMIHGIFSYEIFGHTVWITTSHVCILIVLLLMLGLAIAANRTMKHAKEIPEGFQNVLEIMVEKLDAMVYGTMGKVAAPKFVNYISTIFVFILMSNISGLFGLRPPTADYGTTLALGLITFALIHITQFKNLPPKQIWKDMCSPLPPWLPIWFPINLISEIAVPISLSLRMFANVLSGTVMMALVYGLLGKIAIIWPAALHVYFDLFSGAIQTYVFCMLTMTYISQNYETEMLRRLNDALPGLVLGIIVYGAAVFLAGIWFVPDKLRFTTGLAIGIALACGMAVNMAVVLRDAVEIYGEAKARSKIIARSVTRYLVVVIVFFVMMKWELGSLPAAFIGVLGLKISAYLQPLAHRFISKLGGRGDVPSDSRENEALMKNQRKVFQSLTLILQFGLNMIVPIVMCTLLGAWLGEKYGMPIITVPLFIMGALAGFNNIFKMAKKIYGQGNEGKRDHVEKTKMSGKRTDYISWDEYFMGVATLSGMRSKDPNTQVGACIVSEEHKILSMGYNGFPTGCSDDDFPWAREGEPLENKYFYTTHSELNAILNYRGGSLEGATMYVTLFPCNECAKAIIQAGIKRLVYDSDKYNGTPSTIASRKMLSAAGVDIQKYEHTGRIVTIQLMSKVVVMDHPLIQHKIGIIRREETGSKDFRTLVSEIAMLMCYEATRDLKLTDVEINTPICKTTVKELKGKKLAVVPILRAGLGMVDGMLNMIPAAKVGHIGLYRDPETLEPVEYYCKLPADCANREVFVVDPMLATGGSSVAAIQMLKDKGVKSIRLMCIIAAPEGVKKMQEAHPDVDIYIGALDDHLNEHGYIVPGLGDAGDRIFGTKMRQYNRIIFVAESGTCRAPMAAGILQECNLKHPVEILARGLVVLFPEPLNQKAETVMISNGINMDGFMSTQLTEEDFSEDALVLVMEHSQREKILEKYGHADPENVYVLTELVGDELEIIDPYGGTLQAYGLCYETMRKTILKLVNLLNESEDNGTDMQTKVVKIDSANIDDAAMKEACDLIRAGELVAFPTETVYGLGADALHPEASKKIYAAKGRPSDNPLIVHISKFEDLVSIAREVPPQAKKLADAFWPGPLTMIVWKNDRVPYETTGGMDTVAIRMPKHPVALRLIEGSGCLIAAPSANTSGKPSPTEASHVALDMDGRIPMILDGGPVGIGIESTIVDLSEETPMILRPGYITQEMLQEVLGEEVRMDPGIIASDSTRKPKAPGMKYKHYAPKADLVLVEGETDKVVARINELVREKQQLGQKVGVIATDETFLRYEADHVVSIGAREDEDAIARHLYKILREFDDWNVDAIYSESFATPRIGQAIMNRLLKAAGHQVIPVMKITKSDFGTLNTGENIYIYHMENANGAYVEVINFGCRLVKIVVPDRDGKMTDVCLGFDSMEDYARDNASLGAVVGRVANRIKDGHFCLDGKEYQLAINNGSNHLHGGLIGYASKPWDAKIKDDKLILTMNSYDGEEGYPGNLTLSVTYGWSEDNELSLLYEASTDADTLLNVTSHGYFNLNGEGSSEVLSHELFIDADQITELDDSQAPTGRFLPVEGTPFDFRSMHTIGKLMDSDYEQYHKFGTYDHNFVINGTGFREAAVLQSKESGIRMTCFTDQPGMQLYVANQPIEVTGKNGTQYACHTSVCLETQHFPDAINHDNFPSIVLTPDEPFRSKTLYHFSTFMAYVISDSCVSCGTCEPECPVGAISQGDSQFVIDAGSCVSCGTCAGVCPTGAISEGMEKVRYMISDAANIVHVESHVLRYWEDELELNIPRNEMGHRYYTKENIAEFQRIKELKEQGYQLKAIRMIVHNGPIEGLTAEAPIPVGQAPLSAGAAAAIPQPVQPVAAQPAAVAQPVQQSVQPVQPVAAQPAAVAQPVQQSVQPVQPAAPQQLPVKTTAESPQSILNNTDKMAQFTELMTEIVGKALAANNEELGQSISEEVGKQVIKEMNYLMREREEAEEDRFRRLDAAIRGNIRKKDEQKEKKLWKKKKPSQAMSQKSLVVYFSCSGVTKKTAELLSDVAGADLFEIRPEVPYTKADLDWMDKKSRSTVEMNDPSSRPAIADKVEHMEQYDTVYVGFPIWWYVAPTIINTFLESYDFSGKTVIPFATSGGSGMGKTEAVLHALCPDSVNWKSGKMLNGYDRAQMEAWVRTLAMPGKKAMLVISNGKSTRASGALDRTMKELSLAGVEVVLYDKVGANPVKEIVEEGGHFAKKEGCDFIVALGGGSVMDAAKVMAMYAQQPGDLWDYVAGATGKQQPLVNPVLPVIAITTTAGTGSEVDQWGVVTNPATNEKIGCGGMDELFPVIAVVDPELMLTVPSKFTAYQGFDALFHSVEGYLSVVNSPMSEMVQLAAIENIGTYLPRAVKDGSDLEAREHVAFANTMSGYSMVVGSCTSEHSMEHAMSAFHPALPHGAGLIMISVEYYRHFIEKHCCDERFVRMAQALGMKDAKAPEDFITALKKLQEDCGVSDLKMSDYGIEKEESMVLARNAKATMGGLFACDPVPMTDEECAAIYEKSYRMTIKEISEKYHITADTLRYYERVGMIPPVTRTASGIRDYGPKDESWVSLAICMRRAGLPVEAMIEYVKLFQQGDKTIPARLQLLVEQRELLEEQQRQIEETRKRLNYKISRYEEAMKTGKLTWEENEGCHTNFITQQESCSEQDSMHLVMRYLCFFGIVKRQGVKRRMDKRSTSEEQKSGYLGLTRADEERHLADVISVAQQNLERAGADIRKVNEDLADLLETYDVKDKEGLALWNNATARLKENEYDLIRYEKARKKPYFGRIDFKDGISQEEETCYIGRAGIAKNGSEPVVLDWRAPIASVYYESSMGPCTYTVSSEGTYEMDLVRKRTYEIEQDVLKDFFDSDVVANDELLTKYLAKNKKAVLGEIIATIQKEQNVIIRRSPRTNVIIQGVAGSGKTTVAMHRISYILYNYKDDFRPEDFYIVGSNRILLNYITSVLPELDVYGIRQLTMEQLFVRLLYEDWDDARYSYHSMERDDPKNSVKCDTEWFLDLKTYCEEYEKESVPAEDVYLEKTGKLLIGADEIRRYLKEHPADSMESKMLMLGEIVHSRYENEILGRDITFPAEEKKRLDRKYTMYFGKGKWEGSVYAFYQDFLAAQAARGREVTPPGNSFDVYDLAALAYIYKRIKETDPVREASHVVIDEAQDFGMMAYRCMDACLSDCTYTIMGDTSQNIHFQYGLNDWDELRRLILTGDYDAFGLLRKSYRNTVEISTYANEILRHGDFSIYPVEPIIRHGAGVCVEPVQEERALLNRAAETIQGWQRKGYETIAVICRDEEEAERVAARLAEDVPVKNGAKGEKEEFGDGVMVLPVSYTKGLEFDAVLLFDPSEKKYPSDNGHVKLLYVAATRALHELTILHRGELSGILAGRAPQDKHIKEFAAEPLTKAREYEKPVRTKKEQMQQRRVEGAMDMAEREYFGPRRIAAKAPAAEEKPVIRPAASPAVRPQTETVRGQQAKTVHRPQTGAMHRPQAETVRGQQDMATSPAPAGKRPGPEGTNPSPYAFGTIPENTSLRVRGHAKGNHAVRWVKKSRSYVEMASMYGLMRITPVAPDIIRVSFVKGVTEKIAATGWMTKAEEAFSWSARESKSVVEIAAGEITVRVDKRSGAVSFWNRENQLLLAENAAEPRVIGEEGSWVFFDWDKKERIKAKGMLDTDFLDVTLNARYISFGGKKHRMPLVLSNRGYGIAAAAKNTVLLCDIKTYGQYLYAEGERQLDYYFICGEKPENVITRYKGLMDANITGLSAREVTERRERGEGGAAAERITKSRAQIVRENVFTLFNLLNFIIAGLLFAVGAYTNMLFLAVIFLNIAVGIAQELKAKKLVDELSILNRPGVCVRRGAKDIQIELDEVVKGDLMVLQSGNQICNDAVVVEGMLEVNESLLTGESDAVVKEAGSELYSGSSVISGKAYAKVTHVGNENYATKLVNEVKKEKRVASELLGSMNKVTRFTSMLIVPLGVILFFEAFLLRQAPMREAVVSSAAALLGMLPKGLVLLISISLATGVIRLAKMKILVQNIYSLETLAHVDTLCLDKTGTITNGKLTVDAVMEISAGLSGKALPQGEPEKLVQSYLAASDDNNATFQVLKEAFGGQAFYTPAHKISFSSKRKWGCISFAGAGSVFIGAPEKLMRKLPAELEQKLEEGCRVIIVGYLPMQWEDEAALPEEIQPLYGVVLEDTIRENTRETLDFFHREDVDVKVISGDHVKTVSMIAKRAGLHRWKDAVDLSTLGEDIDYDQICRQYAVFARVTPGQKKELVCALKRQGHQVAMTGDGVNDLLALREADCSIAVADGSDASRQIAQVVLLDSDFTNLPQVVMEGRKVVNNVTRTASVFFIKTIYSVLVSVICLLANIPFPFIPIQITVLDAAIEGYPSFLTIWESDTRKIRGRFLKTALSNALPFALTVTAMVAVTSIIAPFTVEQRQTVMYFLLIFIFMAAVVKSCIPFNGLRTFICITMVIGTFGGLAILPSLFEISAITAGMGKYLLAGGSLSVVCLLLLLGTRGVLGRKRLSEAEAVRMISNIIRNRYLKVPDKHAAANLTAKSGISNHAAAGIRDDPCLSKFGALYGLCPQAGRQFMEEALVKRIMPNSLEAEQSVIGSMIMDKDAIVTAMEMLISEDFYHTQYGILFDTMIELYNKGLPVDLVTLQNKLKEKDVPPEIASLEFVRDLVTAVPTSANVKYYAQIVKDNSMRRKLIKLNEEIENECYVGKESVETVMDITEKKVFDLLSTRGGGGDYVPIRQVVMNALEKIENAAKTSGTVTGIPTGFIDLDYRTAGLQPSDLILIAARPSMGKTAFVLNIAQYVAFHENMCTAIFSLEMSKEQLVNRLFSLESRVDAQALRTGNLSDADWEKLIEGAGTIGNSELIIDDTPGISISEMRSKCRKYKLEHDLKLVIIDYLQLMSGSGKSTDSRQQEISDISRSLKALARELSVPVIALSQLSRAVEQRPDHRPMLSDLRESGAIEQDADVVMFIYRDDYYNHDSDMKGISEIIIAKQRNGPIGTVNLVWLPQYTKFANMEKMKVILLQDVKALGKKGDVVNVSDGYARNAIFPKKLGLEATPKNLNDLKLQNQHADKVAQENYEAALALAEELKDKKITVKMKAGEGGRTFGSVSTKEIAAAAKEQLGMELDKKKMQLPEPIRSFGMTEVAIRLHPKVTGTFTVHVVEEMRKSNVKIKGKLRTYLYLPLLLTMLLIIINVFVYMEDTSSGVLFSGFVLLYFVIMLIAYLRNKPLLIDELINFATQYGLVQKQLLNEFEIPYALVDYNAKFLWVNEQFTEVTGKDKKYHKSVMTVFPTLTKELLQRSEPVESINLTYNDRYYRVALKRIYFDAMTHDSTIVSLDESNEYLTAMYLFDETELNRYIRENEEQRLVAGLVYIDNYDEALDSIEDVKRSLLVALIDRKVNKYFTEIDALVRKIENDKYFVVFKNQYLGKLREDRFSIIEDVKTVKVGNEMAVTLSIGIGVGGDSYTKNYEYARMAIDLALGRGGDQVVVRDNEDVTYYGGKTNKQVERNNRVKARVKAHALREVIESREHVIIMGHSISDVDSLGAAIGVYCAARVLGKKAQIVLNEVTSSLRPLVEGFSEEKGYPADLFIKSEEAILLTNRDTLVMVVDVNRPSYTECPELLKRTDTVCVFDHHRQSSEVIENPVLSYVEPYASSACEMIAEVLQYFSENIKLEPHEADCIYAGILIDTNNFMTKTGVRTFEAAAYLRRAGAEVTRVRKMLRNDMAAYKARAEAVRHAEVYRGAFAISVCPADNVESPTIVGAQAANELLNIVGIKASFVLTEYQGKIYVSSRSIDEINVQLIMERLGGGGHLNVAGAQLTDCSVLQAKHIIQDTIDEMLKEGDIEEMRGHWYKTTVMLTMVLMLAGCGGNDAEAEQTAQTEQVEQTEQTLEQVLEEHFLAAEDAEDVATVVSQYAEETPDPALAEFLISYYQIPNEEQSKTRYYYNHIDLNEDGTDEIFVVVVGEYTKVSFGDPALILSEQADGTFQVIESFEGIHTPVTVSERMTNGWHDIIYQEYGRGAEDGYRICHYNPNGGYQTDLSEVVDEVEPQDGTQIISNNFIDDMDKGNYMTLAPAEDGGSEAQGNMAFNKAADKEGAPMKRRPMHRRKKVCVFCGKDNVIDYKDTNKLKRYISERGKILPRRITGNCAKHQRALTVAIKRARHVALMPYVCEMNKVILMGRLTRDAEVRYSQGENSTAIARFSLAVDRRFRRDGDEQTADFINCVAFGRTAEFLERFGRKGTKFVLEGRIQTGSYTNKDGQRVYTTDVVAENVEFAESKNSSGGGDNSGFTPSDRPSPSSAAGDGFMNIPDGIDEELPFNMNKYELALVVSAKIEDDARTATVEKAKEYITRAGGTVTEVEDWGKKKLAYEVQKMSEAYYYFIQFDAEPTVPAEVEQDVRIMDNVLRFLVVRKDEKMNQYHYEVGDIVKLKKQHPCGSSEWEILRVGADFRLKCAGCGHQIMIARKLVEKNTRGLRKTGETEMTNIEQFLQMVKESDNIVFFGGAGVSTESGIPDFRSVDGLYNQKYDYPPETILSHSFYIRYPEEFYRFYRDKMLCLAAEPNITHKKLAELEAVGKVKAVVTQNIDGLHQLAGSKRVLELHGSVHRNYCRKCGKGFDAEYVRDYPGKVPLCDACGGTIKPDVVLYEEGLDQQTLEDAVFYISHADLLIIGGTSLAVYPAAGLIDYYRGNKLVLINKSTTPMDARADLLIQAGLGDVFGQIEVMGVMIFLSDIMIPLLIFGIVGYGILNRQNIYEEFIDGAKDGFQTVIGIMPTLIGLMVAVGILRASGFLECFSGLLGRGIGWLGFPPELIPVTVVKMFSSSAATGLLLDIYKEYGADSMLGKMASIMMSSTETIFYTMSVYFMAAGIKKSRYTLVGALIATTAGTVASIILAGYMMGRKKYVLIVDDCQQDRMAVADVLRSDYDILEACNGKQALEILSRKRAQISLIMLDLMMPVMDGYEFLEMYRKRKEYSYLPVVVCTTEDDPEREQKSLELGAWDFVLKNSSPGIMRLRAGNAIEKSKVRFLEYDFLTGIYGQQKFYQATRELLDQRAGENFAFIHFDIDRFRIINTLYGSKEGDRLIHFVAGAIRKVMTAYGRGTYGRLGGDVFGMCVPYEDGAAIYHILEGIRAEIRKHTVHYYLETCAGIYLVDDPDMEVAAMHDNAEIAAAQCKGQYMVHDVLYTEEIGQKMLREQHIIDEMDAALAEQQFIVYFQPKYQLKKMAPYGAEALVRWKKPNGEIVLPNEFIPIFERNGFITKLDYYVWEKVCQFIDSELSQGRNPAPISVNVSRVNLYNPDFMDSLIDLIQRYHIPPHYLNLELTESVFSEDAELIQRAVNYLHDAGFTILMDDFGSGYSSLNILKDVDLDVLKIDMKFFSKGNTAEKGAKIIEAVIRMAESLDMMVIAEGVEEKHQVDFLNDLGCDYIQGYYFGRPMSQDQYEKLTNHDEEEQHDMPQPESSMNYLWAFMILTGIIYGAFHGTLPQITTAALDSAKEAVTLCITMMGVMSFWVGLMRIAEKAGIIEGLSRRMRPVLHFLFPDLPQEHPANEYIAMNMIANVFGLGWAATPAGLKAMEALQERNLELCGQKGTSRKRGPDIATDEMCTFLIVNISSLQLIPVNIIAYRSQYGSVNPAAVVGPGLVATICSTAAAIIFCKLKKRCMQTNTSETRQRRKLLCRKINIFYVGKDAVIQNFAMLLRINGMLSRFIPGCIYMKKRMHSSFIHTFSRQFVLFPLITSVFLLNGCSRFSMQTDFVAGSTSSFDTFLDDFFRAEVSSNTINLHFSLSHPENYGITETPITLGSLSEEALAASHASLENTLAALAKYDRDALPPSGQLTYDVLQNYLKTELSASDLTLYDEPLRPTTGIQSQLPVLYEEYRFRQPADVEDYLALLALTGDYFDQIIRFEQQKAQAGLFMSDYACNTLISQCNAFTADPDQHYLIQTFDHKIDAMSELTEDQKTLYKEKNAALVREHVLPAYTHLAAALTELLGSGKNDMGLCYFADGKDYYRYLVCHNTGSASDLPALQDRILEKRQSDLQQAAALLSENPQLKASQTTVRLPAADPIATLNGLQEAMRANFPAPPETTFTVSSIDECMEDYMAPAFYITSPIDDYAQNSIFINASTDTSSLRYFTTLAHEGFPGHLYQTVMSYEAGLHPVRFLLNYPGYVEGWATYVEMISYHYAGLDDDLASLLSLNQSALLSLYASTDLGIHYDGWSFSDTTAFWKDFGITDQTALREIYELIVEEPAHYLKYYVGYMEFVDLKEKAQETYGSAYSDIAFHKALLSIGPAPFSIIETYLDDYYLPDAAPQMHAGSIQDVRALCTTKGKVMAGKLYLCATPIGNLEDITYRVVRTLKEVDLIAAEDTRNSIKLLNHFEIRTPMTSYHEYNKIEKAYQLVDKMREGLNIALITDAGTPGISDPGEDLVRICYEEGIEVTSLPGPAACITALTMSGQPTRRFAFEAFLPREKKERAAVLSQLVNETRTIIIYEAPHHLIRTLEELYETLGDRKLTVCRELTKRYEEKTLTTFSEILQYYKDNEPRGEYVLVIAGKTFEELKQEEQKNWENLSLEDHMEVYEKQGIGRKEAMKLVAKDRGISKRDVYQALLSMFNDIAIGPITIHMYGVMIAAGFLAALLMTLRRGKKRGYDEDIIWGIFFCAIIGGMLGTRILYYIVEIPEIMKDPSILWDFKNGYVVYGGIIGGILASYIYCRTKKQAFMPYFDLVMPAVSFAQGFGRFGCFFAGCCYGRETDAWYGITFHNSSFAPNGVKLIPTQLISAAGDFIICALLLWFASKRPKAGRVAAAYLVLYGIGRFAVEFLRNDYRGSVGVLSTSQLISIGAVIGGIVLYFVAPKLAGVGNVAEEKSVGMTPNNLVHENERLDELHRNGYYIIQDPARFCFGMDAVLLSGFARARRGERVLDLGTGTGIIPILMEAKTEAEDFTALEIQEESADMARRSVLYNHLEEKIRVVTGDIKDASGIFGASSFDIVTTNPPYMIGQHGISSGSEAKAIARHEVLCTLDDILRESAKLLVPGGRFYMVHRPFRLAEIMSKMVACGIEPKRMQLVYPYVDKEPNMVLLEGSRGGRSRLTVEKPLIVYKEQGVYTDEIYDIYGYMVKVVGVRFRNAGKIYYFGPGKLDIHAGMHVIVETARGVEMGTVMTEPKGVSEEEVIQPLKPVIRIATEADEKTVAKNREKEKDAFRICLEKIAKHKLDMKLVEAEYTFDNNKLLFYFTADGRIDFRELVKDLAAVFRTRIELRQIGVRDETKIMGGIGICGRALCCNTYLSEFAPVSIKMAKEQNLSLNPTKISGVCGRLMCCLKNEEETYEYLNSRLPGIGDRVTTVDGLKGEVSSVNVLRQMVKVLVEVDDEKELREYPVDELKFRPRRRKENIKLSAKELKELSALEDKGGKSKIDDTKMAGFKAILGHEQIIEHLQNAVTMDKVSHAYIINGPDKSGKMMLAEAFAQTLECEKLEDVVKNAAQPSDVEPCMECHSCKQAMTKNQPDIIYVRHEKPNTISVDDIRTQVNNDIVIKPYSSRYKIYMIDEAEKMNEQAQNALLKTIEEPPAYAILILLTTNAAAFLPTILSRCVTLNIKAVPDEKIRGYLMRKYQIPDYQADVCVAFAQGNVGKAIQLASSEEFNELKGAVLQLIKRLRDIDLYEMTEAVKQIATYKLSINDYFDLMMVWYRDVLLFKATGDVNGLIFKDEVYDIKRQAEKSSYSGIETILEALRKAQIRLNANVNFDLTMELLLLTIKENMDIKVNQAQMVTQVPDTVTTETGDGTFKFTLASAITDAELQAKVDSLLSDITFQGNRIAEHMDIRDMKKYRGLIRDFMNEVVYRSHKFSRENFLDRKGRHRVYGLIRLIDANLDELAQELVKDEKDHITILSKIGEIQGLLLDILTMGKIYCMMGKSSTGKDTLYKMLLEDGALSLKKIIPYTTRPMRRGETDGVEYYFCGEKELADLLKRGKVIELRAYDTVQGVWKYFTVDDHQIQDLRQNYLLIGTLEAYGKLRDYFGKERVVPIYIEVEDGIRLERAIGRERQQREPHYEEMCRRFLADAADFSEEKLLDAQITVRFANDDLKQTEENIRDYILSQNDMYQQLISYGESDVYPFHMPGHKRRALPFPNPYTIDITEIDGFDNLHHAEGLIREAEERAAKLYGADRSYYLVNGSTCGLLAAICAAARRGDKVLAARNCHKAVYHAISMQGLAAEFLYPAITRGDLQGQITAAQVEEALTKHPDIAVVILTSPTYEGIVSDVAAIAACCHAHGAALIVDEAHGAHFGFGAGFPENAVRLGADAVIMSLHKTLPSFTQTALLHCNGTRIDPGRVARYLGVYETSSPSYLFMAGMDACIDLLREQGAELFAEYRRRLDAFYRDTADLAQLHVMRREDLCKEEAYDWDDSKLIIYAGAMGGEALHQELLGHYHLQMEMVSADYVLGMTSLMDTDEGMRRLVTALHEIDEKNRRMAELHETAEENRKTELDGEVPEAGFTARMYRKNPRRMQIYQALDLPYREMPLDEAVGKMAADYVYLYPPGIPLIVPGEVITEEFIRHIRECRERKLNVEGQGNLAPGRIKIVYFMNHALIILCGGGSTRMGTDKALLPFGEVSLLEYLVNKYKPHFSHIYLSVKKPGEYTHLSLPVTEIADLYMNAGPMSGVFSGLSMMDEDQAFILPIDTPFLEPEVGLQLLEHLDGFDIAAVSGTETDQKVPASAYSKSCLPSIGKCLLLHQFTFDTLREKCSVSYLKREEATKDSDIPADLQFSHLDTRDDYYLALRHLHCIMKHTIIEKAALKAKSEETGIPFSNLLAGYVLEELMYLIEDSPFSLFLWLKNSGALGVEQYRKKNLLTLDFAYVTDPRAMKREGIVPGQELSLKMGYVMLAYILKVEKVPDISWKGRASAGDHRVDLEIAGEFEEMTVPIHIRVTELTEEGLVPVKRTFMPFMEGGKQIPYLEYPVESILAENLFYLIRDMELLPDMSVYDKVYGILKTEPVDGRHIQELLGEHCKKQQLLPEESRMKEILSYRDYSYMRKRWEKYLRHRKRKEPAWTEVMQVLEQFLPQMWSTLCRDEIFFGDWMPDLQRFLDMSESYVINEKRELILDRVKEFIYQNGGVVKKSQLNELGIDYRRILDFVEKGDLIRIKNGYYAVRLSDFSEEELIARLFPDCVLNLETALYAYGYLNRKPYGYKLSVDKNTSKSRFKLDFPPVVPLYAEPETLTLGVTEIDYGGAKMKIFDRERLMCECLKYEDKMERELFKEGLLAYIRDPKKDVAKLMKYARERRVVKKVQTMIGVWLMEAKSPSLRKNPSRETCEGIIRRILMTEVLEKGKNEHFRTAADFMKYFESLYPASDALTKQVQRAIRSLNMPKDELGYFIPNKTAEQLAQEQELTYIFKKANADVCRMDDYQPLFLKADDAVSSYMLSRITDSPLFQGKYLTAHTVSGGILFYTKNPNQLEILLKSLIVRMRRANVWKKAACVALSLLYFLQIKPQVVQAADYWPEGPEVQSPSVILMEMSTGTVLYEKNSDERNYPASITKIMTTLLALENSDLNEVVTFSDDAINNTEGSGIYRDYGEQMTMEQCLYAVMLNSANECAYAVAEHVGGTVEHFVDMMNEKAAELGCTNTHFANPHGLFDENHYTTAHDMALIAKAAYQNETFRIITGTARYTIPPTNKHDEPTDLQNHNEMLYPFKTLKYRYEYCTGGKTGYTDIARSTLVTYAEKDGMSLVCVVMHTESPNQWTDSRNLFDYAFDNFQLFNIADNETRYMDSEAVEVGALNNNKAFVDIDANANIVLPKTTDFNDAASEIMYNDVSENVVGTLAYTYAGRQVGKADIVTTGAVVDGYIFDNQSEVEQETDTEEKTVSTVRIRPLTILLIVAGILVAAGLIFAGKKFYDNYYIIRHNREVRRNRKEQFRQIKSKSRRRRRHRRMRLRNIPGADAAITESVYCIKSPETHKGHWQEIFPSQQPLHIEIGMGKGRFMMDLAAAHPDINYLGIERYSSVLLRALQKMEENPLPNLFFICMDAADVAEVFDHGEVDRIYLNFSDPWPKDRHAKRRLTSRQFFARYDEVLAPEGRLEFKTDNQDLFTFSLEEIPEAGWHLDASTRDLHHDPVLNEGNIMTEYEEKFSSLGNPICKLIASRMEQKNIEVQRKKGLNLMMKILITAIIPLLILVTFAGLAIRAVGVSVSDKLMQHELKTSIYAVNQTLSVISSGDWNVDGDQLYKGDYNISEHQDVLDAFKENTGLDVTLSWNTTRMATSLVRQDGSRETGTEIAADVYQTVKEKGSYFVSDNVIDGQKYYGYYEGLYNSDGSMAGLVFTGMASTSVHEIYNDRLKKNIIFMVVLAIFACIFLAIVMMKIVKAMMSMIDHLDDVAEGNLDSKISDRMTSRSDEIGNIARALYSLIGGLAMIVKNIRTSAKSLDDFSARFQNSFTTINESIHNVNTAMEDIANGATNQAGEMQKVNEQISDMNEAIAETTKNVENLTGSTEEMKEQNHKLDGTIKDLVEISDRTRESVDEVNRQTDRTNQSVMEIGSAIQMITDIASQTNLLSLNASIEAARAGEHGKGFAVVADEIRQLADQSSDSAKKIGDIVEELIKNSNKSVETMNGVLDEINEQNEKLSTTREAFDGLNTEVGNVVVAIDNIRREIETVNTAKNDVMSSMESLAAIAQENAASTEETSASMTELSGIVTDCNAQTKNLVDIAENLSDNVNQFRIKEMQVEQRLLKYVSYWTTSDENNMADGKIQIPSTGRQFDLGKVLEQELRDLGLKNVILTDHCYVYGLLPATAGCEGHKAVGFISHMDTAPDYSGKDVKPQIIPDYDGGDVRLNGTGAMLKVSDFPTLKDLKGRTLITTDGTTLLGADDKAGVAEIVTALEEIISSGMPHGDIWVGFTPDEEIGCGADLFDLDYFKAAFAYTVDGDYEGEVAYENFNAASAKFSIKGVNVHPGEAKDIMVNAALVACDIQSQLPPEETPAHTEGRQGFYHLTDMKGDVAFAELSYIVRDHDRASFESRLNRLRTLEVEINQKYGTGTVSLTITDSYSNMLEIIEQHPYVVDIAKKAISMTGLTPLSRPVRGGTDGARLSFMGLPCPNLGTGGYGFHGPYEHISVEGMQTAVSVIKNIVTIVAESDLMDKKENQPREKKGMPLAPVFLLGATVLLLIEMYFIVNLPRLYLVQIILGAAILACTYVFIAALLKEIHKSGEQAKDEYERMLRGEKASYLMLKKISEQLEAVDRNTREPGEEIITAQKAIAKVTITRSKENADALMNSNDRVVDNLLQLKESMDAGFEQFAGKQQNMMDDSVKELVLKQQEFAEELKEITAGLKEITEGLQTVKETVAEEKAQTLAAIENRMDELVSQNAVLESKITESTAAAAAQKPEPDMEPELVMEPQPEEVMEPEPDMEPEPDMEPEPDMEPEVLTESESVMESEPELVMEPQPEEDFSMPDTPEEELPVVDAETVTDDTPVLEEYEEPVVDSDAIVEEEDAAAATDDQNEAEAERGAIDSFDFGADGLDFGGDSLDLGVDGLDLGTENLDLGADNLDAGAGGLDLGADSLDLGGDSLDLGADSLDLGAENLDLGTENLDLGVDSLDLGADSLDLGAENLDLGTENLDLGVDSLDLGADGSDLGGESLDLGADLKEEAAPENEAPDEPEPVAAPEDEIPDEPKVAEPQKEPETKAEEAAPMDFSDPHKLMTPEEIAALIAKMMNETSSKNEITSGIIWKQLLLFFFPILLGSFFQQLYNTIDAVIVGRFVGKNALAAVAGSSGMVINLLVNFFTGLTAGASVIVSQFFGSGDRKKVDDSIHTIYAFSIIGSVIMTLIGITAAPALLRLMNTPEELMSDSILYLRIYFAGIFFVFIYNTGAGLLRALGDSRRPLYCLMICCVINIILDLLLIVGLGLGVAGAAIATLLSQGISAVIVTVFLMRQKDLCDFSLKEIRIHPKLLKSELLLGLPGGFQYAMYSISNMIIQSALNKFGTDTVAAWAAYGKLDAIVWMVSGAFGIAITTFVGQNYGAGKYDRVRKSIRVCIGMDFAAAILLMLVLVCFRIPLFHIFVTDENVVEIGLKMMATMAPFYWLFVFTEVFSGALRGMGDVVVPMLITTGGICLFRVVWIFGVVALFPTLTVTLLNYPVSWVLTSVLFLFYYHFRMKKLTAHMKKWTRVMYQPNRPLKEGCYVTASKEHIALSREAAAEGMVLLKNEHKLLPLKAGSRIALFGKGSFDYVKGGGGSGDVTVSYVHNLYDGFQMLHDAVSLYEPLCDFYRANVNEQYDQGSVPGMTTEPALSAGLLAGASAYTDTAVIVLSRFSGEGWDRSSIEYNGEYNPWETETSMPKISGEIFPDGDFYLTKEESAMIAQVKQHFSRIAVVLNIGGIIDTSWIKNDDQISSALIAWQGGMEGGLATAELLCGKISPSGKLPDTFAASVDDYPSTADFHESVDYVDYTEDIYVGYRYFETFGDAAKRVCYPFGFGLSYTQFSLTVQSVTETAQAIRAFVLVTNTGDYSGKEVVQMYYSAPQGLLQKPARELSAFCKTRTLLPGESQLLTLETAKNSMASYDDLGKIFKSSYILEKGDYHFYIGTSVRDVTALDYVMTLNANLLVEQLSSKAAPTSLKKRLLADGSYEELPQGTANDPNACVFEKMVPGTEEALAPATRGRGSYLLLNFYKENAHPLIDVYEGKISLDEFTAQLDNDDLIHLLGGQPNTSVANTYGYGNLPEYGVPNIMTADGPAGLRITPQCEVCTTAWPCATLLASTWNPALVEQVGTAGAEEVKENNIAVWLTPAVNIHRNPLCGRNFEYYSEDPLLTGKMGAAMVRGIQSQHIGAAVKHFACNNKETNRKHSDSRVSERALREIYLKAFEIIVKEADPWVIMSAYNMINGHRASENHDLLEGILRDEWHFQGMVTSDWWTRGEHYKEIKAGNDVKMACGFPERVKKAMELGELDRSDLERCAKRVLDLILKIDMSKDEYLITDAPLKALTVFAMPMILGSFFQQVYNMADSIIVGQYVGSSALAAVGACAALTNVFICVALGAGVGAGVLVSRYFGARDYGKMKTIVSTSLISFLILSVLLGVFGFHFSHPMMSLLQTPTDILEEAVLYLRVYFVGFPFLFMYNILSTMFTSIGESKIPLGLLIFSSVLNIIMDLWMVAGLGLGVFGAALATLIAQGISAVFSFVIFFYRMRQYKSPFHWFDGQELHYMLRIAIPSVLQQSTVSIGMMIVQAVVNPFGTQALAGYSATMRVENVFSLIFVSIGNAVSPYVSQNLGAQKIGRIKKGYHAALVLDLCFAVLAFIIIETLHTQISSLFLGKDGTAFAYQVSGDYMRWLGYFFIFMGIKMATDGVLRGLGIMRPFLIANMVNLAIRLSVALIFAPRFGIAFVWLAVPAGWLANFLISYAALRKSWPDDRIAASCNGCMDSAETKKMTEEEIRVPGRYDVPAGELMVIRSVLPQDYNENTIAIRSSMENVRIYIGGELRTVYDTKNTRPFGKNSASGYVFCETSGEDAGQEVRIELQSFTEKYSGVVNTVYCGDKSDIWTYMFHCYFMVTLIACTMLFSGLVVLIISLVLDIVYKTRFDLEYLGWCMILGAVWMLGESKLRQLFVPNASILSNMCFLVVMICPIPIMFYIDSVQQGRYRKVYHVAECIICVNFVICTILQVLNIADFISTMFLSHIVIAGTFLTIFITICRDLIKGTAKHYKLPLIGLVAAMIAVMLEVTEVYRVVSLSGIFIAIGLVVLLVVTLIQTMDRIRELELARQKEARESLDYLTGLPMRHKGETLIIEKMQEHDGCLGFVDMDNLKKINDVYGHKAGDHALRLVGAMLTACMENAVVCRLGGDEFLFYLSEVSEVEMNTQMRKLFDSFEAAKNATTETSPASLSCGLCMCRQGESFEEYYIRADKALYYVKQNGKNNYRFYEELAEEMKTITRAKYLDRIIELNGTPDIKIITGIRRSGKSKLMQAYIEYLKSHFENINIIFIDFMDLAYEEIKEYHALHAYVEEHYQEGKTNYLFVDEVQMCPKFELAINSLYSKGKYDIYVTGSNAFLLSADLATLFTGRYIEIHVFPFSFQEYCQYYDDVNDKDKLFDDYAIKGGLAGSYAYRIEKDRTNYIKEVYETIVTRDLVQKYALPDTLVLQRLSEFLMDNISNLTSPNKVSQLLTANETPTNHVTVGKYIKYLCNAFVFYDIKRYDIRGKKYLESSEKFYLCDSGIRYAILGSRNMDYGRVYENIVCIELLRRGYDVYVGKLYQKEIDFVAQRGSEKIYIQVSDNISGQETFERECSPLLQIRDAYPKMIIARTKHPKYSYEGVEIHDIADWLLQEMKILILSAGMDADYVDDDEDYGYDPEVEDYDADSSVDEDDNEPVMRDFDFIVSPAKLLTPEIVQMVSSIHEHKGKQELFLEANVDELKTLLEVALIQSTGASNRIEGIFTSDKRLEELVSQKAEPRNRSEQEIVGYREVLSTIHEGYEYINPRPNIILQLHRDLYSYSQGGAGGSYKNSDNVIAETDAEGHQKARFIPVPAFQTAEAMEELCARFLEAWEADRIDKLVLIPMFILDFLCIHPFNDGNGRMSRLLTLLLFYKAGYIVGKYVSMEMLIEKTKETYYEALQASSTGWHEGENSYEPFVKYYLGIMLKAYNEFESRVEHLKHRSLSKPDRIKAVIDNKVGKITKKEIMELCPDISKITVERTLTNLVKSGYIAKVGAGPSTGYVRVMCVPLSDIKAVQGDSGHAQVNMVTDAYSHISDDDQRKNAELFKEAFYEKKNLNPERRALLNSLAKTMKMMTKTIIFDYDGTIHHTLGIYEPAFRETYQWLTEQKVTEEREIGSVEIAGWLGLNSKEMWNTFLPELDQSYKEQASTMVGDLMIRQIRKHKAVWYPGAEEMLTALKNRGYHLVILSNCKASYREAHWKEFGMERWFDRFYDCESYRFRPKTEIVQEIIREYSGPYLVVGDRRQDLECARSCKSPFIGCLYGYGEKGELNGADYYAEHIEDILQMVIMRQINLVEGKVVAPEGMKVGIVAARFNEIIVNKLLGGAVDGLVRHGVEEENITAAWVPGAFEIPITAQKMAQSGKYDAIICVGAVIRGDTSHYDLVCNESAKGIAQVELATGIPVLFGVITTENIEQAIARAGSKAGNKGYDCALSAIEMVNLMKQLMSQNYQYNTIEEALRDLKEGKIVLVTDDPDRENEGDLICAAEFATRENINFMATYAKGLICTPMSAEIAARLNFPPMVAENTDNHSTAFTVAVDHADTTTGISAEERSYTIMKCVDDQSKPEDFRRPGHVFPLISRKGGVLVRNGHTEATTDLMRLAGLKECGVCCEVMKEDGTMMRTSQLWEMAKEHNLTFITIRDLQDYIRIHEKHVKKEAVANLPTQYGDFKMYGYINDITGEHHLALVKGDLGDGEDVLCRVHSECLTGDAFGSLRCDCGLQLQTAMRQVEAEGRGIILYMRQEGRGIGLINKIKAYALQEQGYDTVEANVKLGFAPDLREYWVGAQILSDLGVKSLRLLTNNPDKVYGLGEFGLKINERVPLEIPAQKYDRKYMKTKQEKMGHIFKEINLMFTGIVEEKGKVRYIQLTGESGILAVKARKVLEGTRIGDSIAVNGVCLTVTSIQPDGFTADVMAETIRRSSLGSCKAGSQVNLERAMAADGRFGGHIVSGHIDGTGVIRSMLQEENAIWVSIETSPQILHLIVEKGSVCIDGISLTVARVDEAGFQVSVIPHTGEETTLLEKVPGDLVNLENDVIGKYVEKLLGIRKNEEEKKESGITMEFLEEFGFMFKSLGVAQAKNRNKKEGIEMTDQEYMLRAIQLAKKGEGWTNPNPMVGAVIVKDGKIIGEGYHKKYGELHAERNAIASLTESAEGAVIYVTLEPCCHHGKTPPCTEAIIEQKIRKVVIGSRDPNPKVAGKGVQMLREAGVTVVEDFMREECDQLNPVFFHYITTKTPYVVMKYAMTLDGKIATKTGASKWITGESARKEVQHMRHQYMGIMAGIGTVLADDPMLNVRVEGWKSPVRIVCDSKLRIPPGSQIVKSAEKYRTIVAYAEQKNAEEKIKILHTMGVETIYCPDEKNQIDLKKLMADLGNRGIDSILLEGGGTLNDSALRAGIVKEVQAFVAPKLFGGVAGKTPVEGIGVELPSEAVELKYTDICQIGEDIRIKCQVCDKKQEESCLQESMAEKVDQMDPDEKIVEIAIERLRVLALELRNYMKIAHPGTFISKPVNMHKFLRAIGFSHITKEQLQHIFADIISAPTVQKAALDSEGNEFAELSKEYGDFFGISVRGVYNEDDTFEMEYYYPYLCGKNISTIEPAEVEKHAEKESYAGICDEVRIGVTLIFYLQNVVDYLAVSKSKGYMNLADGVILAALSTEGKILFPINKAEKKVPHAPKEGTDRNHLIAAARDGDEDAIENLTLEDIDTYSLLSKRITHEDVLSIVDTYFMPYGIESDQYSVLGEIMDVTLLQNRFTEENVYSMEIMCNDILFSVCINQKDLLGEPEVGRRFKGNIWMQGSVKYRDMRIQLVRTLQGGEKLAGPVITKENEILISEGTTLKTEYLDLISFLGIETVCIEDPYEEDEIPHDIISNEKREEYIEKIKSILEKHIYHRGSSLREIEYVAEDIIQDVMQADENMVIDLLEREGNLYEHTLVVTKLCIIVAKKMKLTAEQIYRLALGALLHDLGLRYITVPYINCDINELSEAEAFEYRKHPILAYSVLEEEKWMDPFVKKMVLVHHERRDGSGFPLKQKTRDTECGILQACDAFDCFISGMECRRMSIQQALEYLVEGTDIFYDRRIVRAIERLVARYPVGTRVRLNTGESGIVLKQTENSIRPVIRILDEENRLTEKVYQLNKNKNVSILQVENMISQYLGFDSDYIIIGLSAVVLILLILIIVNIAQMRKLKKAYKVFMSGKNGKNLEDTLIKRLDQVDTLLEANNENEKTIKSLFEAMQLTYQKMGLIKYDAFNEMGGKLSFSLAMLDVRNNGFIINAMHTREGCYTYIKEIVDGNSIIVLSDEEQKALDRAMGKTENNEMAAAKKGGLGKGIDSLIPNKVSATKTEAKNENVKNDKVIEGVLVNINKVEPNREQPRKNFDEDALLELSESIKQFGVLQPLLVQDRKGYYEIIAGERRWRAAKLAGLKEVPVIIKNLSNQEVVEISLIENIQRENLNPIEEAIAYKRLLTEFNLKQDEVAERVSKSRTAVTNSMRLLKLDERVQQMVIDDMISTGHARALLGIDDQEKQYTTAQKIFDEKLSVRETEKLVKKIQQEKDQPEAKEEVKIDPKMEAICRDLEEKMKVILGTKVAINQKDNQKGRIEIEYYSMDELDRIMDLFGSIRKMSRIIAIANQKGGVGKTTTAINLSSCLAEAGKKVLTIDLDPQGNMTSGLGVDKNELENTVYELMLDECSIKESMADTVVEGMKIIPSNVNLAGAEIELLGINEKEYILKNAVDYIRDDYDFIIIDCPPSLNMLTINAMTTADSVLVPIQCEYYALEGLSQLIHTIDLVQQRLNPNLIIDGVVFTMYDVRTNLSNQVVENVKENLDTKIYETLIPRNIRLAEAPSHGLPINMYDSKSAGTESYRMLAKEVMERMAVKVMITDDHSLIREGLKQLLELEGDFQVIAEACDGIDCMEKLKEQIPDVLLLDINMPRMNGLEVLQKIKDEKIDVKILVLTVHNEVEYLLKAVDIGINGYLLKDSESSELKKAILSVVDGEDYIQPSLIPVLNAKMIDRDMDSEKIEKLTKRELEVLKLLAVGMYNKGVADELHISERTVKNHVSSIFKKIDVSDRTQAAVFAIRNNLISIHMVEEYIQKIYEELLKEEQNSAKRISDLQIHLKETQAMIHLLEETNDPNYESFTPRKVNSRNKQKIDELHAEMKELEEAIQQETDYHTQQMERVEEAAKVLRQAKADVACRCDRNTLEEERYHTSLLETQENERQRISRELHDSTVQNLTAMVHMAELCSKLVDMDPIRCKLELSKMIKNLREIIDDTRKMIYNLRPMSFDDIGLDITIERTLDKLEATGTKKIHFVVEGTPYQLKPIIGITLLRIIQEACSNAICHANPTLIHVLLRYEQGAITVIVEDDGTGFDVHILDERPRDDNSGFGMSMMKERVYLLSGSIQIDSKIGVGTKIIVKVPISNKEEFMNNSMKKNIRHFFLLTALAAGTIHLVNRFIDMTAEMKNILKTESGSYYHWKNGSIFYIKRGSGSPLLLIHELNPIASSYEWCRLVKKLENHYTVYTIDLLGCGRSDKPYLTYTNYLYVQLLTDFIHDVIGERPDVVTTGNSISFAVLAQNMNPNLLASITAINPPAMSSFDCTPDKYSSVKKTLLELPILGTFLYNVRTHESNIQRTLQKTYFSRPQLVSSKMLDAYYEASHMGKSHGKYLMASIEGHYTDNAIGHAVKKLTIPLYIIESRSMTDAVAIADSYAHKNATVETAYISNAGLTPQLEVPDKLLNIMRMFLHEDHMAYNLEKFKKGLDDLQIHLDEKQMRQFLTYYELLVETNKVMNLTAITEFDEVIEKHFLDSLSLCRVKDLRSLEDRPEAYRILDLGTGAGFPGIPLKIAFPKLQIVLADSLNKRIRFLQEVIDTLGLEDVTAVHGRAEEMGRNTLYREQFDLCVSRAVANLSSLSEYCLPFVKMGGAFISYKSGEVDEEAAQAKRAIYLLGGEVKDIYKFDLFDQKRSFVVIEKERKTPKAYPRKAGTPTKEPLQMIMNSKNLLEETYDVAVVGAGHAGCEAALACARLGLETIIFTVSVDSIALMPCNPNIGGSSKGHLVREIDALGGQMGINIDKTFIQSKMLNKSKGPAVHSLRAQADKANYSMEMRNTLQNTEHLTIRQAEVAEILTKEGDREQITGVKTVSGATYHCKAVVLCTGTYLRARCLTGEMITYTGPNGLMAANHLTDSLLAHGVEMFRFKTGTPARIDKRSIDFSKMEEQKGDEKVVPFSFTTNPKDVQIDQVSCWLTYTNEKTHEIIRNNLDRSPIYAGIIEGTGPRYCPSIEDKVVKFADKDRHQIFIEPEGLHTNEMYVGGMSSSLPEDVQHEMYRTLPGLEHVKIVRNAYAIEYDCINPNQLYASLEFKKIRGLFSGGQFNGSSGYEEAACQGLIAGINAAMEILGREPLVLDRSEAYIGVLIDDLVTKENHEPYRMMTSRAEYRLLLRQDNADLRLTKKGYEIGLISKERYDWVCKKEQMIKEEIDRVAKVHVGANKEVQALLESYGSIPLNTGVTLTELMRRPELDYDKLAPIDHERSELPEEVREQVNILIKYDGYISRQIKQVESFKKLEKKKIPEGFDYNEVPSLRIEARQKLKLYSPTSIGQASRISGVSPADVSVLLVYMEQMNHHGEHHSMIRHICMFKLKDENKEANLKEALRRLEEMREIPLIATFEVVTNAAAAPDSNYDLSLIFDFKNMDDLNAYQKHPMHVEFGKFITAIRESRACIDYEFMKTDTIAAIATAMAGSGIGIVRISGEEAVSITDQIFHMPGGKKLSDMETHTIHYGHIRDGEEVIDEVMVLLMRGPRSYTREDTVEIDCHGGVYVMKRILETVIKYGARPAEPGEFTKRAFLNGRIDLSQAESVIDVISAKNEFALKSSMKQLSGAVSDAVKEIRGEILHEIAFIESALDDPEHISLDGYGERLELTIEGAVDRIEKLLASSDNGRILKEGISTVIVGKPNAGKSSLLNTLLGEERAIVTEIAGTTRDVLEEQINLNGIILNIIDTAGIRDTDDIVEKIGVDKARKYVKDADLILYVVDASTNLDENDGEIMELLHGRRTIVLLNKSDLTPLTTAEDIRVHVDKDCPVISISAREQKGIDVFTEQIREMFFRGEVTFNDEVYITNIRHKTALQEALSSLHLVEQSIADGMPEDFYSIDLMNAYEVLGTIIGEAVEDDLVNEIFSKFCLGKMKMDYIEISAKTVDDAITEAIIKLGTTHDKIEYEVIEKGSAGFLGINRKDAVIRARRKNDTNDNIRDFLESVFKAMGLTVTIQIEKEEDSNVVNVDLKGDDMGVLIGKRGQTLDALQYLTNLAVNKNSEEYVKVKIDTEDYRKRRRETLENLAKNIAYKVKRTKRPVSLEPMNPFERRVIHSTLQNDKFVTTHSEGEEPYRHVVVTLKKMSEMLLTAYDGAILGPIAKLLGWVMNGVYYLMDQIGIGNVGLSIIIFTIIIYLLLFPLTYKQQKFSKLSQKMQPELNAINKKYQGKKDQASMMAMQQETQAVYEKYGVSMMGSCVQMLIQMPLLFALYRVFMNVPAYVSGIKNLFTQPLGGNATSLVDGIMATEGYQDTMTNLVSTLKITTQPVANFTVSDPTAIANSIVDVTYKMNSSGWDALKDAFPALSSEISSTYETVSHVNNFFGMNISDTPLHVITSSFSAGAYLMVIAALLVPIISYLTQVLNIKLMPQATASGNDQSDAMAQQMKMMNRMMPLFSLVMCFTVPVGLGIYWIAGAVVRVVQQYFLNKHFEKMNLEDIIKKNQEKAKKKREKMGIAENQISNAAKMNTRQMVDANKKQLSSAEKELEIEKANAAKSKAKAGSMSAKANMVRDFNERNNRKMKKILIALIKFYRKYLSPMKTTKCPYCPTCSLYGLEAVEKYGAIKGGTLALWRIIRCNPFSKGGYDPVPMKYSESLKKTKDFQNVYRRGKSYANRYLVMYVLSNQTEGNRLGISVSKKVGNSVIRHHLTRLIRESYRLHEDMFNSGLDIVVVARSTAKDISYHEVESALLHLGGLHKIISKEKKMESFMRYEDDIPTKKETESESSRFQKQNEHSRRKKSIGCKKIKRMVVESNFTRYRWHEFLPYIYSGYFFPQRADCGNVDEFMDQILEKWDEILMTVKTEHDISDIAFNTFLRPLEFYGVTGNTAYILVPSEQLGLSYISKKYYLPLKVAITEITGTEYEIKFILPEQAKSIASSPNKQKKPFYSEAASKSNLNSNYTFDTFVVGSNNRFAHSASLAVAESPGEAYNPLYIYGGPGLGKTHLMHSIGHFILERNPDAKIICVTSEEFTNEVIESIRSGNAAAMNKFREKYRTIDVLMIDDVQFIIGKESTQEEFFHTFNALHSAGKQIILTSDKPPKEMETLEERIRSRFEWGLMADIGTPDYETRMAILRKKIEADEMNLSDEILNYIATNIKSNIRELEGALNKLLAYSNLEKTEITMEIAQKELQNIITPDKPKEITPQLIIEVVSEHFQISLDQMISKNRSKDIARPRQIAMYLCKNMTDTPLDSIGALLGGRDHSTIIHGVQKISDEYESDETTRSLIDTIKKKINPNMKLICSKSNLLHGVNIVSKAVPTRTTMAILECILIDASANEIKLTANDMELGIETKIEGEIAERGVIALDAKIFSEIVRKLPDSDVVIETDASFKTTITCEKAKFNIVGKSGDDFSYIPYIERNEAITLSQFTLKEVIRQTIFSIADNDNNKLMTGELFEIEENHLKVVSLDGHRISIRNIELKNNYEHKKVVVPGKTLQEVSKILPGSAEEDVNMFLTDNHIVFEFDDTTVVSRLIEGEYFKIEQMLSSDYETKVKINKRELLDCIDRATLLVKEGDKKPIIMNVTDGNMELKINSFIGSMNEDIDIVKEGKDILIGFNPKFFIDALRVIDEEEVSLYMVNPKAPCFIKDDEGKFIYLILPVNFNASTVMIEIEIRKEDEFIKLGQALKKAGLVESGVDAKFVIQDGLVTVNGEVETQRGKKLHGGELVSYNGETVKIVRMNIRSIELKNFRNYENLEISFDEGTNILFGDNAQGKTNILEAAYMSGTTKSHKGSRDREMIRFGEEEAHLKTVVVRGGREYQIDMHLKKNRAKGIAIDKIPIKKASELFGILNIVFFSPEDLNIIKNGPAERRRFLDSELCQLDRIYLADLTNYNKILAQRNKLLKDMIYRPSLSDTLPVWDMQLIETGKKIIRRRKQFVDELREIVSDIHYRISGGKEELFLKYEPNIDDIFFEDELSRAKEKDKKLCQTSVGPHRDDLLFSIGDVDIRKYGSQGQQRTSALSLKLSEIELVRKSISDTPVLLLDDVLSELDSSRQNYLLNNISDTQTIITCTGLDEFVRNRFTVNRVFEVIAGHVYERSIMGTENEYGADQIQILEGLEAVRKRPGMYIGSTSARGLHHLVYEIVDNAVDEALAGYCKNIEVTINPDNSITVEDDGRGIPVGMNHKAGKSALEVVYTVLHAGGKFGGGGYKVSGGLHGVGASVVNALSTKLSVEVYKDGQIYSQSYKIGKPDEPVKVIGKCSAEKHGTKVTFHPDPTIFEETVYDYDTLKQRLRETAFLTKGLRIVLSDARVDPVHTHEFHYAGGIKEFVTYLNKSKEALYPEVIYCEGTRDGVYVEVAMQHNDSYNDATYSFVNNIITPEGGTHLAGFRNALTKTFNTYARANKILKDTEPALTGDDIREGLTAIISIKIEEPQFEGQTKQKLGNSEARGAVDSVVSEQLTYFLEQNPTVAKNICEKSLLAQRAREAARKARDLTRRKTALEGMSLPGKLADCSDKDPKNCEIFIVEGDSAGGSAKTARSRATQAILPLRGKILNVEKARLDKIYGNAEIKAMITAFGTGIHEDFDISKLRYNKIIIMTDADVDGAHIATLMLTFLYRFMPELIKQGHVYLATPPLYKIEKNKNVWYAYDDNELNSILTEIGRDGNNKIQRYKGLGEMDAEQLWETTMDPEKRILKRVMIDEENSSEIDVTFTTLMGDKVEPRREFIEENAKYVQNLDIMDDKIFDQIHDVDLKKTMESSYIDYAMSVIAQRALPDVRDGLKPVQRRVLYSMIELNNGPDKPHRKCARIVGDTMGKYHPHGDSSIYGALVNMAQDWSFRYPLVDGHGNFGSVDGDGAAAMRYTEARLSKISMEMLADIGKDTVDFVPNFDETEKEPTVLPSRFPNLLVNGTTGIAVGMATNIPPHNLREVINGVVKIIDNQVLEDRGTDIEELLTIVKGPDFPTGGTILGTAGINEAYRTGRGKVRVRAVTSIEPMQNGKNRIVVTELPYMVNKARLIEKIAELVRDKKIDGITDLRDESDRQGMRICIELRRDVNPNVVLNLLYKHTQLQDTFGVIMLALVDNQPKVLNLYEMLNYYLIHQEEVVTRRTKYDLNKAEERAHILQGLLTALDNIDEVINIIRSSKNTQEAKDRLMERFALTDVQAQAIVDMRLRALTGLEREKLENEYAELMERITELKAILADKKKLLGVIREEILLIADKYGDDRRTSIGFDEYDISMEDLIPVTNTVITMTKLGYIKRMSLDNFRAQNRGGKGIKGMETIDDDYIEELLMTTSHHYLMFFTNTGRVYRMKAYEIPEASRTARGTAIINLLQLQPGEKITAVIPIREYTEGHFLFMATKKGIVKKTPITDYANVRKTGLAAINLREDDELIEVKKTDNNQDIFLVTKYGQCIRFKETDVRKTGRTSMGVIGMNLTDGDEVVGMQMESQGDSLMIVSEKGLGKCTLISEFTTQNRGGKGVKCYKITEKTGNIVGVKAVNHDNEIMLITTEGIIIRIKVADTALLGRITSGVKLINLDENVTVASIAKVRENKELETADTSELLTDEEEAASAALAAENAKKAAGQSDNSETDDELMDELLKRAEDDAKDDSDEEMSTYGAILGASIGVILLCLVVMVACYVLYAVSHMKALKALGYKNAWLAWIPYGVFYACADAAAEGEGEKVKLFGSLELPAMVFKLWWILPLALLFIPVNGTVENVITIVLNVVFLGCSYAKMYAKLEGKQESETQAIGCVSGLIPIIAVVKFLSYKGNNMISQERCRILLPGGGVCISLNDVQTERMQIGFIGAGKVGVSLGKYFKEKGRNVGGYYSLTRASAAWAAAFTQTTCYESLEEIISSCGMILFTVPDSAIAEVWRQAKPYVSGKVIGHCSGLYSSDIFSDWDSMNCHACSVHPLAAISSKENAWRELSGVLFTLEGDSSYVKDLETFFHSMGNRTRIISKEDKIKYHAAAAISSNYMTALFSMSEQLLLDCGFAQEEARSELYALAKGNLDHILTQGCVQSLTGPLERNDCATVEKHISALNVKQRKIYTSCAEYLTDLAQSKHPDRDYTEMRKLCRNGEHSPGAECAETVMKNTVLTLQKQKEEHDKIVMVTAYDYTTAKIMDEAGVNTILVGDSLGMVMLGYEDTLSVTMEDMIHHTAAVSRGAKDAFVVADMPFMSYQTSVYDAVVNAGRLMKEGRANAVKLEGGVEFAPHIEAIVKASIPVVAHIGLTPQSVNAFGGFKVQGKDVEAAKKLLADAKAVEAAGACMVVMECVPAKLAAKISEELTIPTIGIGAGAGCDGQVLVYQDLLAMYGDFRPKFVKVFANVGEVMREGVKAYIKETKEGTFPGEEHCFKIDDSVIEKLYMKIVSTIEEVRAQVKEWKKEGQSIGFVPTMGYLHEGHMSLIDAAGENDKVVVSIFVNPMQFGPTEDLASYPRDLEHDAKLCEEHGVDLIFHPTPEEMYGDQFYSYVDMDVLTKELCGLSRPVHFRGVCTVVTKLFNIVTPDRAYFGQKDAQQLAVIKRMVKDLNMPLTITGCPIIREADGLAKSSRNTYLSIEEREAALVLSRSIFLGKEMVEKGERDCKKILAAMTAEIEKEPLAKIDYVKIVDLDTMQQVEKIDRGILAAIAVYIGKTRLIDNFMYELENMTIKMLKAKIHRATVTQAELDYVGSITVDMDLLEQAGILEYEKVQIVDVNNGSRFETYTIAGERGSGVMCLNGAAARMVQTGDKIILMAYAQVTPEEASELRPTVLFVDEKNKVTKVTNYEKHGEIGMPQNFYELVWIFIIYAFIGWCTEVSYAALDTGKFVNRGFLNGPYCPIYGCGVVIVVAILTPLKENLLILFAGSFLLTSVLEYITGYILEKVFHNKWWDYSDKPFNIKGYVCLKFSIYWGLACTFIMDIIHPIIYAAIRFIPFVLGVVLLSIIMCVFAADCIITVTTILKFNKRLKVMDEMAASIHRLSDEIGENIYENVTDVIEKSEKFQETHVELMDKISETKENIYGLPQTAKDKLAETTGAAKDKLAETTGAAKDKLAETTGAAKDKLAETTGAAKDKLSETKESISELPQTAKNKLAEKAENYAASREEKKRERELALEEKKRERAELMERYEKLYEEKSFGFQRLMKAFPDMKSRDNNETLEKFKIHFNIKKKDENKKDQASMIRTIQTDEITKNIKEMCIQANHYLSADMDAAMKHAADTEQSELGKKILHQLQDNLKIADEEMIPICQDTGMAVIFLEVGQDVHFEGAAIEDAVNEGVRQGYTEGFLRKSVVGDPLIRENTKDNTPAVIHYSIVPGDQVKITMAPKGFGSENMSRVFMLKPADGIEGVRHAILTAVKDAGPNACPPMVVGVGIGGTFEKCALLAKQALTRPVDEHSDIPYVKDLEEEMLSKINQLGIGPGGLGGTTTALAVNINTYPTHIAGLPVAVNICCHVNRHVVRTLMDKHIATPITEEVTRDLKAGDYVYLTGTMYVARDAAHKRMIEALDRGEELPIDIKDATIYYMGPSPAREGRPIGSAGPTTATRMDKYAPRLLDLGEKAMIGKGKRSKEVIDAVIRNHAVYFAAIGGAGALLSKCITKSEIVCYEDLGAEAIRKIEVKDFPVIVVIDREGNNLYETAIRQYHTLEEMMSEGVFTIAAKRPIRAEMTISRNTGLGTSNSATWFSLGAGTSITPESYDTMSIYIGAAGTGTFLIGEQPETMDLHPDEILLVPEKTLCGVKTGEGCIYTEIITKKENTMNDLVKAKEVLNLKKLISYEEGSIANVDIVHNDTMKFVLMAFDEGTGLTPHRAPGNAILTALEGTAVIGYEGTDYTLNAGESFRFEKNGLHSVTAKGRFKMSLLLVLEMILEIKNGCFGYPKQDIILADINLSLEEGHILAILGPNGIGKTTLLKCMIGLLPWREGATFLYGQDIKTLKPKELWSNVSYIPQSHGFAFSYTGLEMVMLGRCSHLGIFEQPGRREIEMAEAMMEKTGITHLAKKDCNRMSGGELQMVLIARALINEPKLIILDEPETGLDFHNQILVLNMIDRLSHEDGISAIMNTHYPTNAMSVADEAFMMNHKGTFFYGSTEKVLTEKNISVSFDVNVVVNEFSHHQKKIKSIVPVSLTDKAMMNDNFLIKRGHFTPLAILFMILLPLVTALICICLGRMNVPVGDVIAVFRDVLTGNEGHAQNYSIVINLRLPRILMAIIVGAGLTCAGNTFQSLFSNPLATPDILGVTSGTCVGAILAIILSCGILETQLIALVFGLASVFFTLKIAGKNENRQVVYLVLAGVIASSLFNAIGSLLKYTADPQDKLPEITYWLMGSFTSATYKKLLIGSPLILIGIVVIYLLRWRLNILSLSEDEAKASGINLKRTQMIFILASTVITASAVSMCGQVGWIGLLVPHCARMLVGSNNRYVVPISLSLGASFMILIDTLSRTISVIELPLSILTAIIGAPVFISLLNKNRSNLQMIKKTKLTAALLTAAMVLQLAACGSNTASGTENTSDNGATAATGTAAASESAESVDTETAATEDTGTHTVVDHAGNTVEVPNHITRVVIDQIPILSTYMSYFGGEAPYIVGYCGSFKDTISKTVLKNIAPELMESADTVYAQSDLNIEEIMKLEPDVILYNAGNTAHAEILQESGIPCIGFATVGHETEADPLNRYKQWLDLLEDVFGEEGKTDAFTAAGDEIVADVEARIAAVPEDERPSALILWKYSDGVPQVSGNGTFGTYWMKHLGVTDVAAEATGFTQVSMEQIYDWNPDILFVDGPGLIGLTSEDVLENRVEGTDFSSIKAVQDGRVYDTTLGMWNWFTPNPDAPLVFAWLACNTYPEVFADYPLEDTIREYYHDWYGYDVTDEEMEEMLQYMIIETALYQDVLEHSSIFRQLPKDKYPNVLRCLNARVVDYPQDASIAALGDSSGCSGILLTGMLEEYLVDENGNQIIINHLRSGDVFGAESVCAGQVASHVYIHTVEKSKILMLDFAALLSEKTFSCSCRMQVTTNLMQEFARQVMFFNSKIRILSQKKLRDKLKIYLQTLEIAPDGTVCLPYSRRELSEYLYADRSALSRELCKMRDEGILNFSGSRLQILDPDFLAIMILNTGSRTDIPAYYSDWFYERVRAGEVLVRNPYYPTQITRYRLDPAVVDALVFCTKNPLPMLERLPLLDAFTMFWFVTITPYGREIEPHVPDKNLVAEAFCRLSESVGRERVSFRYDPVFLNETYTVQHHVENFGELAEKLSGYTGQCVVSFIDLYEKTRRNFPSVRSVGKEEQERLIAAFSEIAVKQHLQIHLCCENRSLVRQNVDADGCLSQSVLERAIGCRLKVPQQKRARGECPCLLGADIGAYNTCGHECLYCYANYDSRTVRENRLQHDPRSPLLIGHVQSTDIVKDAIQRSWKDPQMSIFDLYMKKELNWAVLGCGVIANEMAQALEHMGKHLYAVGNRTHEKAVTFAEKYGVQKVYDDFQEMFHDPDVDVIYITTPHNTHIEFAREALAGGKHVLCEKSVMLNSRELAEAIALAEEHHVVFAEAMTIWHMPLYKKLWQIVETGDGEIPALGKVQFIQLNFGSYKEYNMKNRFFNMNLAGGALLDIGVYALSIARSFMSSQPDQVLSQVKYAPTGADEQEGILLMNPDGQMAALSLSLHSKQPKRAVISCEKGYIEIMEYPRADRAIVVEAETGKVHEITAGATADALLYEMTDMEDAILNGNTGVMRLKDTRDVMELLTGLRKEWNMKYPGEEWMSLEERFNKKNSELQQKIEVEIVKVKEGQSKRNMVQLQTILIELQASSRQRNVTLSYPRIIIDSWDYSDQLGVELVELAELYKKIMPPEDGPSRKHPPAEPLGEMWYGITFPATQKFVMLWDNFIGISIMEMDTSCRTQDTKQKKSPSWCVMLTLKKNSCKSKFLFMVKENFIYVGIDLHKETHTAVMIDCYNQKLGEITFPNRPADFPKLVTKVKKCNTDAKEVVYGLENAYGYGRPLAVWLIDKGYFVKDVNTAISHRQAKHRGAMYRKSDSDDAEAIALATLNMLDKLPDACPNDAYWSLGQLVHRRDNIMKQRTRLVNQLHEQLCIAYPSYKQFFNDISRPTALYFWEHYPSRKYLKGKSVEDLRTELVPVSHNRCSTKNCEKILDAVASDKVKNNAYQDARDMVTLSIVSDLQHYDSQLAEVDKMLEQMYKMLGCTLTTIPGVNVITAVKILAEIGDIKRFSNANKLAQFAGIAPLHLSSSGKGKDVATKQGNRRLQATIYFLAIQMVQVSSKSTPRNSVVRAYYEKRKAEGKTSQQALICISRRLISIIYGMLKHGTEYRMPVVESAGEKMNKIDDEKHNELIVILSELIEIIELMKKEEKDYLLIQNENEARDWMDFLKNHTDKDELKSLENEISDRFFFKFDVQIGTSELDNKRAELMKKYIFKSNEYLKMEENGRLVQFLYNEDREVVAEKDCSGNIIRYIRGLGLISSDSENAKTYYHYVSDEQGSVSHIIRDEDKESGVSAQGREQDRILNQYEYDAFGNTISCKEQVENRFRYMGEQYDPLTGQYYLRARYYNPVIARFTQEDTYYGDGLNLYTYCRNNPILNHDPTGHGTKENSPYSRKEQQYIDAGADPDTAKLATQCYPDANSKQDLYNKYKSQGYNATDAKKLANYEIVHGEERAKNYAANNVKKSGPDYTTTSPRDNVNTDWRTQERLNAQKKASNSQLMPMNLQFFAAKGDESGSKSGNESNVMNQTFEDMKEIVRKNPFAQHIGMELLEVTEGYALGRIRLAKQYENIYGGMHGGCAYSLADTLSGIAASTYREYVTMLDASMNYLLPVEHTEYVYCKARVLRHGRKITVVRVELLNDEQTLLIDGSFTFYSIRKRDEMFASDSVSLPRLDNPTGACPAHRRQWADFLVSLMAPLHRQYKTARTELASICYMTLEESKEVIPMMEAMITQIEEQQNIMAEMLQEIQEKDEKLMCFQEQEERLQQLEKELSELLQILPDTEELLMLLEEKTDQIQKLTDENQQWQELAQKLNSENRLLQKQNSELLNLNSNMNELRNSKSDDQLEELLLLTEQMQEELDQKDRTIRELKVQLDESLTLNEKLNSENKTENIQALKNDLRKTKELLQSEKEKTHTVQAMIEECRDKQRQAEQERDYALSHQKKVEIPVEKPVLYQKCGNCKQTAYLKAKEKYDMQREKLAGRYKTKTAMYEALMFLLIWYSVSTTLFQMIRSKIFISDCVVFFDTIATFTQTIAGWVVLAGKNVAQISDGISNPVVAGIINWLIRILICGGCLVGVGILLAFIEIKIAGLYKKYCWDMITIMVILVSMAIAIYFGDWIKEVLPINLLFLLLFVQLVYVGIRWYVKGWRENRGYVKDGIYAICCLVPQGTHTKVLKLSAGLRTQSVECSKLGKTRIITDASCGMVRNTGFCDQNLPPHGYLELLSICFLMHILMYRWKAYNYRDIEQTFLLIGHTVDNIEQELGSYDVSPEFERVIEEKIRGTHYDMVFTVNYFPLISNVCERTGVNYVSWTCDNPLISMYHESVFHACNYIFTFDKTNYLEFRGMGVKHIWYLPLAVDTERMDALLGAPEKAERRNATQDSEMQKYRGDVAFVGSLYERNSYDKIKNRLPEYLRGYFDAVMEAQLNISGANIVEPMLTTNILEQLQEYFQLEKSEGSFSDLGLIFQTTVLGFKIAEIERRRALIELSKHYKVNVYSNSDVSDLLRIQYCGSVDYWSEMPKVFRMSKINLNFTIPNIKSGIPLRIWDVLGCGGFLLTNYQAEIPYYFKEGEDLVCFDGLEDLCEKVGYYLEHEEERKRIAWNGYRKVREKHSYIERIHTILDTVACEDAKMKHTIIYFIGVYDTLDLFTGKLREAFETMGYASFVYDARLPQSKDALLSVLAESSSPEREFSCVTFNNLGYNLDMEVPAPAQSVRENDACIQKGGTRNVWEYYGIPYLNILMDHPFHYEKPLRLAPETSVVLCTDRNHVKYIRRYFKNIHQVDFLPHAGVELGSRHKPLAERGIDVLYAGALPIYTVAKMIPDLSSIPEVDGQLMAGDVLAELVHHPDRTTEEVIEEYLKDRRSDIPDKRVQEIIVQMRFIDSYATSFFREQAVRILVENGIRVTAYGTGWDQCEWSGSPYLDYRGKVLAPEILPSMNDAKIVLNTMTWFKAGAHDRIFNGMLAKAVVVTDDSTYLRREFTDGRELVMFRRQELGTLPERVFDLFGHLERAQEIADCGYAAARDGHTWKSRAEYLKECFLTMQYMTSRQKATEWSVTKRMVNYWCANGQIEGAYKEGSRWWIPVDVERPGEEECLRRMRAYTVRITGKKSVAVGIQDFEALRRDQMFYVDKTDFIRQWWESGETTTLITRPRRFGKTLNLSMLNCFFSVSYENRADLFEGLKVWEEKSYHKLQGRFPVIFLSFAGVKGTTFEAVLRQINYGIVEVYRRFERILDMSRFTERERQDFGRISWDMDASTAAQSVRLLTDLLYVYYGHKPIILLDEYDTPLQEAYFNSFWDEMVSFVGAFFNNSFKTNPSLGRALLTGITRICKESIFSDLNNIDVVTQTSTKYETAFGFTEEEVKVGLARVGLLDYREKVKEWYDGFTFGQRRDMYNPWSITKFIDAEGIFDTYWANTSNNKLVSSLIRKSSKNMKMAMEQLLEGEMLHVEMDEQLDFAQLEYRESAIFSLLYATGYLRVNQKNDQEYVLMLTNKEVEIMFRRIIREWFNDMDTGYGDFRRALLHDNIEEMNYYMNMVTLSTFSYFDTGTGRGNIDETERFYHGFVLGLLADLSDQFSIRSNRESGLGRYDIILRAREENGNSYIMEFKVFDRERDENMKACVARALQQIEEKQYETELVADGIARERIRKYGFAFDGKKVLIGSMGLALLAVGILSGLKAYMQSVGKAALQAILGAGTSEVVKELLTLVLRKGMTTREEALEYGMSFPDVYVDTPFHDPNWVLVRSRKNKRAFLWTYEYQGQMRINVKADPEWIDFWRKAYEAVIPGYHQNKKHWNTVILDGSVPDGDVKRMIAESYDLVRMNLSICIITKNEEQNIDRCLKALAPYGLETIVVDTGSTDRTKQIAARYTDRLYDFPWCDDFSAAKNFAIEKASHSYVLVLDSDEFAEQLDLSVLEKQIAAHPGAVGRIRRRNVFHRNGEEQENREWINRIFAKEYFHYEGRIHEQVMPLHGAESGYQTYETPVVILHTGYDLPEQQKKEKAKRNIRLLEQELKQLGWDENAGAKDGVAKAETAGTDANARGSGQIPYLLYQLGKSYYMLGEYGVACEWFAQGLSFDLNPELEYVIDMVETYGYALINSGQEQTALFFENIYDEFGKSADFQFLMGLIYMKNARFTEAVREFEKAAGHAECRAQGVNSYRADYNIGVIYECLGKKEEALAYYRKCGSYAPAEERIRELGRRMVVNHNMASICESRQLRYNVKKMEVSSKKLATGYKIIGANDDAAGLQISETMRHQTRGLNKASRNSQDGISMLQTADAALQETQDVLGRMVELTTQAANDTHTDADRRSIQDEIDQLNQEVDRIAYTTNFNQQYILAEGTPQAAPGYYRIQSGALNGQSIDIQFVNASKESLGVDKVDVSSHQKASESITMVQDAIETASHWRDKFGAQQERLEHAVRNTDNTSENTQSAESSKRDTNMNMEMVLYSTNRILVHASQSILAQYNDDAKAVLEILKMQAIILAAGMGKRLKELTRDNTKCMVKVNGVTLIERMLKQLDKLNLSKVVIVVGYEGKKLINYIGGLKIDTPITFIDNPVYYKTNNIYSLSLAKEYLCMEDTILLESDLIFEDDVLKELVEDERDTLALVDKYESWMDGTVIKIDDQDHIQEFIPGKKFIFEDIPYYYKTVNIYKFAKDFSNLYYVPFLEAYTKALGNNEYYEQVLRVITLLDTPVIRAKRINGKKWYEIDDIQDLDIASSIFVNDDDERLFRVQQRWGGYWRYPKLKDFCCPTNPYFPPKRLLDELKANLDNLVTAYPSGMDINALLVAKNLGVGQKNVSVANGVEEIINIVMTKAEGKIGVVKPTNEEYINRYKADNMEIYVPENDDLSYSAKDIMLYFGEQNISMLILVNPDYHSGNYIPKADMRCIIQWCENKNIDLLLDESYCDFSDERDASMLFDNEYERYQRLLILRNLSVAQGVSGLRLGCAISGNIEKIDELKKDMTIWNINSVAEFYLQIEEKYRKNYTEALEKVKIARRKFQAQLAEIEGLRVIPSQANYIMCEVCGGWRAHELTKVLLIKYDILIKDLTDRVESKKQYIKLAIRREEENEMLVAALKEIFAGERVAGTSVHIDNERTKEFFESRTDKKLPHRYNYVIYQDNNPELALERDKYEKQHMKEMLDIQSENSVLDIGCGVGRWGDEIVKILKTGKYIGIDYSKEFLQIAEQNLADSGKCFFAQGTFQNVEQVLDEHGWKRAYDRIFINGVLMYINDEEIGECLKSVDALLAQHGKIYIKESVGVSKRFTLKDFYSSELGSCYNAIYRALQEYEELFKVYFPTEKYEVQFSGTTWQQQQENRKETTSYYWVIKKNRVMNEEQNMQMANLLLDAIDTGMLNENTIGMFNCWYLNALFEVTRCMSDGKNLYLHIKNYLENINIHRLKKKEKIIVGFIANYSSSWIGDELFELFKQSNRFVPYVYLISNHNVQKDEMISEYKENLEYFQQKKNLQVVQTLDLDTGRQYTWEEVGVKPDLCIWLTSWTELFREQYHLLNYPLDVLHMYVPYGFMLAQDKTGRYVFDQYNKLIHNVAWKIFEDSQCAVEMAEKYTFVGSSNAVYTGSPKMDGLYQTHADIIWDALRRKAGNPTAKKIIYAPHHTVSEDDIIVFSTFADNYQIMLSLAKKYGNDTVWVFKPHPHLKYKAIQAGIFKDMNEWKEYENQWRNLQNADVIDEGMYDELFVNSDAMILDSVSFLAEYLYVHKPLLQLMRKEQRYNDVGDRLIKVHYVADGKDEEAIERFLQEVVLGGKDNKRELREEFFVKNFDYRNIYEKSAAENIFEQIKKCFMLNLEIKKYTDDMQEKWDEFVQYQSCNGTFLQTRNFLNYHGNKFKDTSFAIYKGQGTIVAVVPACLIEIRDKKVFYSHAGSTFGGIVIGKAFYNIEHVDAIMQVLEVYWREQGYDEVKLRQTSTIFAKRNIELLDYFLYKYGYIPYDELSSYVDFEEYREDVISNFSAGRRRDYKYALKNDLTFRKIEKDEEIMEFYQLLCLNLEKYETQPVHSCSELVDFKNQRLRDIVEFYAVYMGEKMVAGSMVFKFENRVFHTQYLAADPIYLKFYTMNYLDGELISLAMRSGYRFFSFGISTEEQGRILNKSLAQFKEGFGTQFGINRTYTKKLGEEYHEMRDIEQYQKEYIKNDFESKYQVPFRRKKLLDIIQRGGYRKILEIGCGMDPLAAYVEEFDEYTIVEQGKEFLENAKKVLHGRKKITYVYGYFEDKIDEISQSAYDLIIVSGLLHEVDDPERLLNAVRAVSTTQTVVHINVPNACSIHRILAYEAGIIPELKKLTERNRILQQNRVFDMESLEQLIGKTGRVEICEKGSYFVKPFSHAQMLKCVEQGIIDENILEALYKLTAYLPEYGSEIYVNYRYTKMHEIPYLNLGRIHENIKEELDQAYREVLDRQWFIGGEADHRFEQEFAAYCGARACVGTGNGLDAIRLILLAYGIGEGDEVIVPANTFIATVLAITYVGAKPVFVDADVQTYTIDLAKVEEKITARTKAIIVVHLYGRAVDVTPIRDLAKQYDMKIIEDAAQAHGAAVSGVKAGKIGDAAAFSFYPGKNLGALGDAGAVVTDDEELAKKVRAYGNYGSYQKYCHVYKGCNSRLDELQAAFLSVKLPHLDAWNEERRKIAKIYSGQITNEKVVLPQIPENEKEHVFHIYPVLVKEREAFVEHLKRRGIATNIHYPTPIMEQQAYQEFRGQMQRYPVTKRICTEEVSLPLYPGMTEDEIQWVCKCVNQYPGKGMQIVKYAFQQHGDDRGMLVALEEYNDIPFEIKRVYYMYDTKEGVTRGYHAHKSLKQILICIHGSCKIRLDNGREKKIVSLEKPYEGLYVPNNMWREMYDFSPDAVLMVLASEVYREEDYIRDYDTFLKMVKEGLEHAMDEKKIAFIICVNDLWYYEECVRYIQELCVPDTYTVDIMCIQEADSMAEGYNGGCEASDAKYKVYLHQDTFITNRNYIYDILDIFENSRIGMIGVVGATELSDPIHWDIGNMAFYNPQLAQDMERLKQDAMQKWMPVKVAGKYLLATQYDIPWQEMDDGWNNYNIMQSLNMRKAGYEIVVPYQKIPWCYHDGGWKSSEKSFAKEEAYRDIAAELRGLLQKQKFSELNDIAENLQDKKVENIAIQEIMDLAEIYRLENASIAQAHSEWFVCDDREKLEEYYRWLRFVILRIGYKRQDDRIEELKSRVKEGRISRDAIRKVETVCMGRSNDAQDCLFDKRKEEPLVSVVMCVYNSENIVGQALESVLNQTYHNMEIIVIDDASVDGSREKILAYKDERIRPVFLEKNRHVCYAGNEGFELAQGKYVALIGHDDIWGKDKIEKQVTFLEEHPAYNLCFSWADIIDEDGCNRNSENRDIYQRFCSGNYPAKIWIRNLLESNNFFCAPSVCIRREALRESGYYRYALVQLQDYDLWLRLLKTGEVHIFQEKLTRYRRFFEKGKNVSEDNARTRIRDAHERQWIHYSYVNDMSAQEFLTIFNGKLKNPTAAQEKEVLCEKALWLWEGGNCFAEDMFARLLEDEECRNILEEEYGVGLKDFYEMNTRPMLFDDSAMDVIKNKNTKLTEYEKRIEHLEEKLCKSMILNKSNWACAPSACIRRSVLDKTGYYRYGLVQLQDFDLWLRILNYTSVYVLQEKLTWYRQFSRKGMNLSDLTGDKGKENRLQHECWWIISNAIEQMSDSKFLEVFSEELRWKEAMSHEAVLCEKAFLLWNVGGSLAAPYFIDMLENAECREILEQKYQFTLNDFYALNRQAMDERKIDFIVCVSESICCEECMRYISDLIIPDGYRIDVLTVFEAEGMTKGYNEAMQESDAKYKVYLREDTFLLNRNFIADILDIFQKNDRIGMLGVAGTDVLLDNGDFLKWNIGSIMAYDGRCIKDHFELRQTSATYEKVEALEGTLIATQYDVSWREELTGWSFYSVSQSVEMKKQGYEVVVPYQENAWCYRDNAIINAEDYEKDHSQMQKLYPEYFPTRRMGGEVEKYRENGRMAEQMRELLTRYVEIHLYHDLGKLLERQRYNWLPDMQVQEVMNLIEIYSLEKMSTEKVHCKWFEMNQWKEMYQSYRNMRWTLLRMAYGRADSRISELEKAVAAGEISKDAIRKTANISSNDTSDVFGCFWKEKKEMPLVSVVMSVYNGEKFVAETIESVLNQTYSNIEVIIVDDCSKDGSRQIIEKYQKKDRRVRTILMDQNSNVCVAGNQAFANANGKYVAVIGHDDIWREDKIEKQITFLEEHPDVGICFTWIEVLGENGVTISKEYEQLYHMMNADNYTAENWLRMDDRKIAFIICRTDKRYYEECVKYLEDLTVPEGYCTDVLSVVDVASTAEGYNEAMQASDAKYKVYLREDVFLLNKYFIADVLDILENNRQIGMLGVRGTDKLPENADCNAAWNVGNIREYDGRCLKDTFELRQPAAKYESVAAVDGVLMVTQYDIPWRGDLTEGWNLYGVSQSIEMRRQGYEVVVPRQEQPWCYCDNSILNSRDYDICREGLMRIYPEIFSVKEIRQEREQHQKEQEMAIEMRQALVWLMEMHLYDEARAALGKQRFNWMPDMQAQEIANMMEIYFLEEASVSKKHSNWFALQNWSKIYVSYQTVRWTVLRLGYGRSDERIPELKRMVDAGEISKDAIRKIANVSLPDTTGIFRYFWTEKKEQPLVSVCVPVYNAGDFLQETLESVLNQTYTNIEFLVVDDCSTDNSRDVITSWQKKDNRVKPVFMERNSNVCAAGNAGFERAKGTYVAIIGHDDVWRPDKLEKQVAFLEEHPDTGACFTWGEVIDENQTIVSKKNRLIYHAMNADNNSAENWLCQMILDKANWACAPSVCIRKTVLERVGYYRYGLVQLQDYELWLRVLCDSSIYILQEKLTWYRRFTEQGKNLSNLPATEGTVNRLMHEMWWSVFHTVEKMTDEKFLQTFADELRWKEASSHEEVLCEKAFLLWNLGGSRAESYFINLLENAKCRDVLEKEYHFTPNDFYVMNKEEMYEDLIANLNPKPQFNLKSYKNEDFYSEGEIEDLIIKIIAENKPEDYGEAVFQNFNWSTYYHLSPVRKNIVNWYKFKPDSSVLEIGCGMGAITGVLCDECRDVTAVELSRKRATATLLRCREKENLEIIVGNLNDIVFDKKFDYITLIGVLEYQDSYTETPNPYRDFLINIKRLLKPDGKLLIAIENQYGLKYWCGTPEDHVGIPFESINQYRDVDKGVRTFSKKSLETLIKESGFAHTYFYYPLPDYKLPVIIYSQDVLPSRQDAENVENMRVNYSAGKSTVVADEKSLYADIVENGVFEFFANSFLVECSDCGDLGKVTYAKLPDERKEQYRILTRFTREHTVEKKPLSKVCEQNHMRQMLKSQSIFSKNGMNIVEYTAENGILTCDYVHKPLLEDVILKASEERNVSEIYRLMDLLYEEILHSSEQIAWKDNILYTLDIGIEENENLYGPILKLGFLDMNFRNAFYCDGELLWFDQEWVLEAVPAKFILYHALIVLYFSYPQLGRFCSFEEVTDRYGMQDSIDAFQKFQKLFEQLALDDAQIIMENAFRVNGRADYIPNIKKLLMKIVSVIVPCHNAAKWLPQCFLSLVQQSIGMDALELIFVDDASDDAGETWALLEEFERAYPESIMIIHLEDNLRQGGARNVALGYATGEYLAFVDADDFVEGDFFEKVYRRAIERDADIVQFDYVYYTERLGKVASGRKTVEESIRIQTKEERKRFLVSEKITYGCWNKLYRRSLVERAGVRYAEHVIYEEPLFVYPLLFYGSRFEIMAEAFYCYRQNEVGTMRRDMRQMTTLQMHADVQLAVWHFMKQTPFFREYYEEIKLYFLHTYFYETLLFAVQRGFEVPYSMYETLRDTVRAEVADYQESPYAAMIPRQMELYRVENNRRNQEEIRYGVQQLMQKMSDTHAMIPYGRQTIEEDDIEEVVKVLKSDFLTTGPKVAEFERAVAEYVGAKYAVAISNDTAALHAACHAAGIGPGDEVITTPITFAASANCVLYCGGTPVFADIDPQTYNIDPEDIRRKITDKTKAIIPVHLAGQPCDMDAIHAIAKEHHLIVIEDAAHALGSEYKGRRIGSMSDMTTFSFHPVKPITTGEGGMIVTDSEELYRKLVLFRSHGITRDPDLMTRNEGPWFYQQLDLGYNYRMTDIQCALGCSQMRKLDRFLARRREITKRYDEAFADCANIVTPYQLPETNSGWHLYIIQVKNHDRKTVFEQLRENGIAVNVHYIPVYYHPYYQEHGFKEVHCPVAEEVYSHIISLPVYPGLTDEQQDTVIETVKRLTKMPVEDRKDTIAFIICVNNELYFEECRYYIEHLEVSAGYDIDVIGIWEADSMCAAYNLGMRSSDAKYKVYMHQDVFIRDSRFLEKTLRIFKEHPKTGMIGMAGGIGIPENGVVYSSWNVGKVDCREPDLSYVLLCGPNQTKDQTVDAVDGLLMMTQYDLPWREDLFSDFDFYDVSQAFEFRRAGYEIVVPYQEEPWVVHDCGFAKLTNYDKNRKICMEEYPEFFNVPEGEELFSSGEWDQLSGQLAAAIRRMIDQGQWDEASQAIGIYHQSQMKSSELEMLAIICEIEQTDRRVSKRSSFLAQAGSCEAICRTYLSVRFLLHRMEFDRPAQDYQELIHAVESGNISVDAILILILHGVLDKEKVLGQLETWHMPDQKSAERLRSFHRRMQKENRGIPYSYSKRAKMELEKYSKEEQMIVFRVDANEQVATGHLMRTLSIASACRKCGLTCEFWLAEEKETERIAKAGFPYRILETRWDALEDELPVMKQRLQAQQVDWLVVDSYCATVRYLAELNRIVPVFYVDDFRKEHYEVSALLQYIPCRERQKTPEGLHEKDGVQYLTGLLYAPLREEFSHLSFDKPREKSILLSTGGTDPYNMAGRILAYGTQMQELQEYLWHVIVGSMNRNEDMLRELAAENPKIILHKNIPDMWRYMQQCEAAVSAGGTTLLELCACGIPTVCFAFADNQLEFAEEMAEHNLLIYAGDVREKDDAPHAICEKLVCYTKDAGKRALSFERMRRLVDGKGAERIAAFLQQYKRDVMKLYEKMNSGVYVIAEMSANHAGKIENAFKIIEEAAKAGADCVKIQTYTADTLTIDCREEPYQIKGGLWDGYNYYQLYQAAYTPWEWQRALRDKCREAGVDFLSTPFDRTAVDFLEDLDVEFYKIASFELVDIPLIEYTASKGKPMIMSCGMASEEEIREALEACRRQGNEQVVLLKCCSQYPAQYEDMNVATIADMKERFGVPVGLSDHSMGSLADVVAVSLGAQVIEKHVCLDRTIDNPDAAFSMEIGEFAQMVQDVRNACVIKGKATYELTEHEKSSLKYRRSLVAVKPIAEGEAFTGENVRSIRPAIGIKPKYYRTLLGRKAKKAYRFGEPILPGEVEMEEAQELNLRKACWSDCRFLFRLRNEDEVRKNSFQTSEIPYSSHENWFAQKLQDFNTVIYILERNGQAIGQVRADRQERTAEISYALCREARGRGLSRWMLSELENRLREDGFCNELYAEVKRENTASQKIFRSLGYRQKPEKYGFSYTKQIPLYSILMCTYHSSMTLGNALDSARHQTCQNWELVILDNGSKDETITVLQEYERIDERIHVIYRDSNVGWRKGISLCLEKASGQYMMFLGADDYLASDETLQEVTDEIRKNHPDIVWTGCGFAVWDDGTYRIAEQKIPPYCIYEQEDKLQIFAELMQKVYYNSVMHYVRIDFLKQYGIDFYEPYYGDCEGMTEAIARAGKMVVMDRMEYVLTTNTSQTATRVCFDYDTERQWKSIRQVLPENTEGKQETLSYVAGRVLDNLVAICQSIVLGEPLTDRYMNPIERGFAERFLRVEEMISNDAMAEMMYWAGRESYAEYLLGAAGVAYWSLRKQQVVIKTIDENSRWMSRFVHLAMQQDENGEIVWKTWISRADGEQLKTLFERKENRHLIGAELLLRNNVEYEESKQRQDIYEMLKVCIEKGGGCHRMKVIIVAYNQFELLQMEIEALRLLAGIEERDLIIVDNGSEDGLRQWLEERPGMNYLICDEGGESYSAIVNYAKAEFQIAEDILLLNPCYMILPDSIEEMQRLLYADREIGAVMPKLIHNGSETAGNYTEAVSYIQEGKIASEVNLQQLKLTDGCVMLKRSMLEKVGIFEEKLFLAENVMWDYCVRGIELGYKLFECGSAFFYQIAEKQKGKENKQHALSDRRLLKEKWDMNYFNAIPNTGLLSYITESRETPLRVLEIGCDCGVNLLWVRNHYPNAALYGVEINASVAGVAKCIANVTVGNIEERQMDFGGVTFDYIIFGDVLEHLRDPEGTLNYCKEFLKKGGSILASIPNIMHVSVVRDLLNGNFTYADQGLLDRTHIHFFTYKEILRMLMRTGLEAVEIRMTINGVSQEDREFVSKLMELSEVSDESMFYAYQYLLQARCADGKMCDMGRILYFQWHSFMNAGMERALQKLEIAYDTFFYTFTDWEKDEEFCCRFEKKLISEKYEKVLSVNYSPLISRVCEDHQVPYISWVYDCPIHIREHETLYNSCNTIYFFDRMQAETYQKQGINARHLPLAVDSEVFRTVYMTPVSVEEQRKYNTEIALVGKLYQTEYQYYLQPLTEYQRGYLEGIIAAQLKVYGGYLIPELVTEELLLDLNRSYAKASGDKVQVTRRELEYMLACETTGRERFVILGLLSQHFKTALWSNEKDERLTHVTHNGYADYYKQMPYIFHNAKINLNIALRAIQTGIPLRVLDIMGCGGFVLTSYREEIAEHFVNGEECVIYENLEDMYAKAKFYLEHEEERQRIAISGFEKVRRDFTFDNALRRILGMEDNRAEQIEALQVLEEFNGRLVKNMEIIVKELSGERLDDTDQFLKGIIDAINWEIQVVNSTMQVLNDGKVRVDKESFNADIVALSEAISAKDDAKMAEEFQRVIPVFKQLGESVNEVIKMDEHKICFVMCVNDDAYAAEAVWYIRRLKIPDGYCVEWQCVKGAVSMTAGYNEAMKNSDARYKVYLHQDVMILEPDFIERMLHIFQDPSIGMFGMVGSRKLPENGVMWYAPCVGKVYMTDVRTTRRNTLEEVRGEWCPVEMIDGMLMATQYDLPWREDLFDGWDFYDASQSQEFIRHGYQVVVPAMERPWCLHDCGNTNLRNYWHQREKFVQEYRCENKYASNENIISKFQIWLLGSERDCSTVEQLLNYEKVQVLGRLEALKEECGNSDFVIVCSAYKNFTEQECFGKARLIRFDFMRLLNEISPETATLCRKTRVEVKSAIGVVCGMSYEQKGIEYESLEHRLMCLAGPSQDIYTDYYRFMWAYNEIVNIQNRKIEYCVIGMNDYRLWWDLSLGTQSLRMLGFYPQIKKIHYLDRHKDVMRMEEEIQLCRTFFQTDFLEKDFLMRYPHIYEICEKKDTRCYCPTEEQKIKDKEEINHIFNKPYPATYEENMGILNRWFKFLQQNRIKTVLLQMPFPSVFRENVNKEMKQLTKAVMQQFCREYDLTLLDLGAKPELFTDEDFYDWSHLNACGAKKVTEQINDFFRSMMETAEGLTREAENIGSEAYAQKRETLEEEWQKCYGVLEEKYLQLMNRNICLHTGEGWEELKIMFSDAAFIQTFEKNDSFLEMKFLLEIYEAEVQAGVRHTVLDTEAQNIEELWEPIRNLRFSLWRVKAAGIPEMGEELCRRIQEENISSVALLFVIRSAFEETSDVLAPLADLFLDHQMLVYAYELLKELQKQMPDVADIRELITELERYLMNDRQIAFIMCVNDDRQADESEFYIRCLDVPEHYEVDVIRVREAVSMAAGYNAAMQSSEARYKVYLHQDTRIISQTFIRDMIKVFEEDAAIGMLGCVGCRKLPANGQAVGHWDVGMVYHNCIPGTLTLEQDKEQPVEVEALDGLLLATSRDVRWREDLFDGWDFYDVSQCLEMRRMGWRVVVPCQETPWCYHDNFYSRMLNYQKYCNKMITEYQDIQSFQAMDYSESRKELEQIKEIARKELYELVDKGEKAQFLELFQEQENRGWLHLKDLEVLADIAAAEREAGMERFWLEGASGEQLRGKLLELHRILKRIEYRKDAADGEIYRKLEAYSTPAIKTVLCAYTERPQAVWDRIQEEMWKRQKDMKVKVDEKKFAFIMCTNNKQYCREALHYIEKLTVPDGYIVEMCVIEDAACMTEGYQRAMMSSQAKYKIYLHQDVMIIEENFLQHLLDIFADKEVGMIGMIGSPEMPENSIMWYGERIGCIYSSSAYHMELYTAGEVMEPYQQVEAVDGLLIATQYDVPWREDLFRKWDFYDISQAFEFRKRGYQIVVPAMKKPWCIHDCGASDFQNYFEERKKFQKEYRGRMQSRETNEEFAREQENANKGWETCYGAALKARLKWIDQMLMEGTDEAHEKLLAFFADEKEIAPYGNRSNAMIEMIVIMDIYKAEVEMGEAHTIFDRKIEGRRMGETELTAYMRAFRFLMWRLEFTKEADAGEKLIQFLKENQVSPVFLCKAVNTMASDEFSMLCEIMELTLEAKMFRHTYWLLLKMQRLAPGEESIRQMIEGLKAYVTGMNILYLSWTENSASDMIETLQQLGHNVCAQLHELSFYFSDALIPSLQQVFASQSFDCIFTFNFIPPVSNVAEAIQIPYLCWVYDGPHVTLYSNSLRNRCNYIFLFDRKMQQDALLHGALHAYHLPLAINADRLASHLSLSGSRDTFFPTTYRHEVSFVGSLYEKTTFEHLKNVPPHLKGYLDGIIAAQKQVWGADVISAALSPDHVNEIYQALPFTRSAGEFITPKDVYTGVIQKQVTSEERISLLNAITNVAPVALYSASDTSLCPKAAPMGIVSYTAEMPDIFHTTKINLNITLRSITSGIPLRAIDILGCGGFLLSNYQPELCEYFTPDVDFVYFEDPDDLAEKVTYYLSHEKEREDIAYHGYQTVTQNFSYPVQVSRMFELFTSALMVRRLKSAQEGIPFLDILLDETICEGEILAPEELVRAAGGINERLRAKQKYELLLRIAQQSPIILEEIPAGTSSDGYVTLGAEEADDFTEQGCRTDCYVIGKYSGELKEAGCFDMAIMGVLAQAQKQGCKERIVPYLENMVAHGEDYYVLDEETEPILIYKGDAVCHNVLTVFAEQFGAALERAGEHVIYYDLNDEDVEGILKFTGRHFKAVIGVQSYLFSVKMADEVHYVHEYIYGPKYNFIFDHPVWLQKHLQHHYPDFYILTLDQNYADFARRYFGKEALLFPPAGMEAETAEVPERQYGLTFVGTMGDYFSQVLWIHGLERPKRFLANRFLLIMRQQPDLTLEQAFARAVEHQGLKLTDQEFLNHLRELCVTGYCVMHYYRARVVETILKSGIRLDVFGNSWKLSPLCRYPNLICHPDVTVEESLTIYKQSRMSLNVMSWHKGGFTERMADIMLAGAVLVTDDTTYLRGRYDYGDMLIYHLDNMDQLPEQIAALLADEERRLQMAEHGREKTAREHTWDGRAVQFLQILRERRMHSEPIHLVIAINQKYIRYAYVMLTSLLLHTSCDVHVYVLHRELNAADQQTFDTLTHSYPVTFHFIHVPDALLPPQKVLATSAWGAEAYFRLAITDLMPSCVDRALYLDTDMIVNQSIDDFYFCDLKGKKIAACAEIIHEPPFGNYRDELFAPLFSAGFSYFNSGTILYDLRALRTDCSFQTYMDLAEKLDYRIQFPDQDLLNYRHSTETLFVDPLRYNLNARYAYDIYSMRYDDMKQNACIIHYATSKPWRGNFVHYNVEQIWWDYAKQTPFYTELLQEALEETLTNTAVNSYITNLLEQNEALYACIEKYDQLLSDAGITLMNTFSMNIAITISHAYVPYAYTLLLSLPAHDSAKFQVYVLHRDLTDEDCNVLSSLSKLYDIHVHFICVPVSFSEAFTDTSAPAETCFRLCLPALLPDTLDRILYLEADMIATASLMPLYTLDFAGKKAACTTDASGNISASVLLLNLPLLHDTPDYPSVFRHALADSFDVHNIFRTSICREDLLLLDSLEYNLSATAAFSQYGLHAATLPDNVRLLHYTGEKPWHGDHLHNDLESLWWNYAKKSPYYPALLEQTIKGMILGTNVITYISNIQKEHRQLTAIVDQYQTLLEKLSMEKAIAIITARGGSKRIPGKNIKNFCGKPIIAYSIEAALKSGLFSEVMVSTDSQKIAQIAQEYGASVPFMRSAKTADDYATTSDVIMEVMDNYKKLGRTFEYICCIYPTAPFVTAQKLIAAQTIMEEKHPVMVMPMTAFSYPPQRCYVMNDDGFMGYKYPQYSRTRSQDLEKQYHDAGQFYVYNAEKYLALHGQVNEGVMPIIVSELEVQDIDNEDDWKIAELKYQLMASRMTFEEYRTQIAAYDCATYFEKYPEIDTTLEHLGRQFDQMEPAVRAHMLDSLEVAVENVPDWMKIHFLSFCMAQKRDPYITEKLLDTVLAADYSEVGEYNKLSHYWQITRAVFTDGTLKSSEVERKLTGLYHTLFEAFSTAVGVTERCYIPRKERNQNLVIVFSPQVLGLGHAPTKTLLDRSYVLKTFLHKEVMIVNTAMYMTKKGRAPFYHMQEAEYAAELSELSSLEFKGETFSYMQCPEDMPDLQVIASLVQLIRDRRPDYIIGIGGNDICADICGRIVPQITVSTVFSGIATSCGEWQMVGKRTLSGTDEMRLQELGVQKECVKCVPFTFSFKPQQDHYTRADLTLPEEKFLVATVGWRLDDEVTGAYLKMLEEAVGEEPAIHVVFVGRFHRFGEALAGYPVLQAHATNLGEQQDVLAVLECMDLYVNPARSGGGSSAAEALSKGLPVVTLPVGDVAVAAGEIFEVEDYPAMQRQILRYAADHRLYAEMTQKARARAELLLDSKAGFGQALMEIEQQLESMEQRNIVLVSGSGVYGAVSKYITEFAAAFRELGYHTVILDGNLKSFRDKYRYLKEHISIYALVDCQAMVADVLPECLEDSSVPRVHYLCDHPLYLYERLERLNESDIILNVDARHTAYLKKYYPRLERVAYVPLSGTGADIQKPYQNREIGLLFTGSYWVPQMPVHKTAEMGFADSVKWSVQTMLTGNPYLSVEDALEKVLESCQVTVGREEFAAILSELSGVEFYAREYYRDRMIRTLLKAGVDVWVYGNGWEKLLCPGREHLHVMDGGAEVARRALGEAKIVLNIMPGFKAGFQERIAAAMLSGAVVVTDISDYLKENFSNGKEMVFYELDHLEELPSIIQSLQENPVRSEKIAENGKRVAQKQHTWMQRVIQMAEQIEVYHGKTADFEANAGGELTVPLCELRESYVVEEIGVRLSEEISRLNDLEHCGCAVQEDVDRLTGYLREWEKQLRERCGYRFFSGNNLEVFLADCGSVRQLLLMADGMLCGIREKYDAAALEEFASGLGAGENRLLYQKAVTRLFKERYKEKEDPWIKLWKQDLEAGTILQSCPGAVCARYEQAVSGLLYDASCDMFYVMIDGKPLYYPQEFSDEQVLERYRKLCEEQDRESAHCYRNGNLQIPDGAVIMDAGAAEGYFALTVIEHASRVYLTDRDERWNAAWQKTFAPYRDKVVFLHGVLGGSEAECDVMTIDDIIGTGRLDFLKVDVGGAEQEVLLGSQKVLGNAAAMRCVVAAYHTHESEAQIEHILRENGFQTDRADGYFLHMDYEKPVWENELRHALVWAERNMLNGKTILVTGGTGSFGNAFTQYVLDHYTPKKIIIYSRDEYKQFIMANKFRKYKDTLRFFIGDVRDKERLYRAFDGVDYVVHAAALKQVPACEYNPMEAVKTNIDGAMNIVDAALDCGVKRVVALSTDKAVNPINLYGGTKLVSDKLFIAANAYAGAKDVCFSIVRYGNVAGSRGSVIPFFRNIVNEGGTSLPITDYRMTRFWISLDEGVQLVIKALSEAKGGETFISKIPSFKITDLAQAILPGCEMPEVGIREGEKLHEIMVTREDSMMTYEYEKHFIVYPHFDWWSNTKIQAGGKLVEPGFEYSSGTNTEWLSVEQIQERLETVKEHMNILFCKHNSICEPGIIRALDLLGHKLILPSCSFSHPDTDDAYDAVLCEEIRKNSFDLVFSVNFIPVIATVCHRLQVPYFCWIVDSPVIQLYSHTLQYDSNYVFLFDYTLYTEFCRKNPGHIFYLPLGCDLPHYDSIIPTPQDHANYDCDVSFVGSLYTEKSPYRAIRTQLPSYIQGYFDGILHAQQLVYGYNFLCDIIPPDLMETLDQLIDVSPSPGYDLDKRTLLGNLLLNPMCTEMERIHLLNSIGEHFSLDLYTQSDTSPLKNIRLRGIASSLDGMPKVFKCSKINLNLTAKGIQSGASLRIFDVLGCGGFLLSNYQSELPQLFEVGRELVLFDSEADLLDKISYYLHHEDERREIAANGYQRIRQEYSYQARLALMLDVRHSLSIMNLLFYRYGSICEPDIIEGFRELGNQVTEITLEIYNKNLGPLEGLTALKNELFAHSYDFVFSINYYPFISEICNIFQIRYLCWTVDCPVMELYSDTVSNPWNRIFLFDRAQYEEIAPQNPGCIFHLPLASNPSRWHSVLQKASPTEHAKYAGDVTFVGSLYTEKCPYDRLQTDSAYLRGYLEGIMDAQRSIYGCYFLEDLLPDSIVAEFREALPGFYIPPEKSIRDDRVAMAQIYLCAKISAQERVRTMQLLGNHYPVTLYTGSDSTGLPVQNKGLVKTLTEMPLVFSNSKINLNITAKSIRSALPLRIFDILACGGFCLTNYQPELEDLFTVGEDLDCYVSEDDLLAKTEYYLSHEKERAEIAQNGLLTVQKKHNYPERLLTMISLAYGLSMKILFFDSPAFAKQDMIDAFEDMNIACDLFFHEEYNDRQSTAFSAAFDVALQEASYDFVFSFNYYPILSSCCQRHGIRYVSYVYDSPLVALYSCTLINPCNYVFLFDKATYLTFKNAGISTVYYLPLAANVSRLSQMTCPASARSAVSAEVSFVGSLYNEDHNLFDRLNGISDYTRGYLESIMNAQRQVYGDFFLEDLLTQDILDELSRVCPYRPMSDGTETLSYVYANYFLCRKITSTERLALLKKASEQFALKLYTHHPSPLLPKAEFVGPIDYYQVMPLVFRHSSINLNITLRSIHSGIPLRCMDIMGSGGFLLSNYQEDFLNDFVPGEDFVFYESEDDFVHKIDYYLAHDNERRQIIANCSGKMQAAHTWQHRIARILEILSMKKVLVIKGRSAYNVLRKAADEIAEGFRAYGCETEVLDTQAEDFLVRLSGCLEQREQYAFCFSLQAIGWEQECTALPQLRDMRRVGWLVDDPFFHEARLIGSVGTGAYVLTVQDAFTQRIREMYPKFEMIETLYHGGFASEQVPRWEDREIDVFFPGSYTSREAVWEKLKKIDGIMGSIAQKVAARLIQNGHIRTWDEELRCYLEEIQFEMSEDEFQTLLRAFYPLDEFQRVCIRERMLEELLKAGRRVSVVGRGWNTYQGGGSENLDILSEEGVDITEVIRYMQNSRIVLHNINFETGMHERIFTAMLAGAVCVTSKYQLLKKFFEDGKEIVTYPADAPEQLPVVIDELLSNPGRAAKIAAAGRKKALQKHTWKRRGEQIAKWMDDGLNFTYMEILENNKRALKHVMPKFLEQRLAAAGVKNVFLEMAADGERIFGIERENRKWYLNSRYDTAFAAAVYAGRYQIRTYGTYFVFGFSDGRHVREFLKKCDDTNHIVICEPSVEIFEECCEQFDVSDILEDKRVQFYIPDATDSIEDIMKKNLQYSDFTFTEFCILPGYDILFHEECEEFQNLIIERMRDEAVKKGTSLSFQRVIPRNTLYNMKHTIRTRNIGQIREALEGYPLEDIPAVVVCAGPSLDKNIQELKKIQGRALIIVVDAALRAVLRAGIHPDLVCTVDPNPPERFFTDLDLRGLTWCCENASKPEIIQKYGERVYYFGYFEKGWNQTISEMLGYGFPVLPTGGSVSSIAFAMALYFGFRKIVFMGQDLAFTGGKSHTSGIEGALGDNDKYIKSRCLMEVEGIDGTMLQTDFQMWYYKQWFEKAIRDGGDRMRVIDATEGGAKIEGAENMKMSEVVAGECPAEFDFRKIEQAIPPAFSVEEQQKLEKAYRKLKLQAGDLQKFIEKQIQALDSLCRKSGGDTGVTDNDVRVLRDMLEENDILEHMPLFGMMTVYAQKAEYELGDTIYTKENMGIRDLAELNLNLFLGYQKAVQMLLEDIEDNLSEESISDKGALGIMSIEIVNKTKQAMEEAYQNREHEALQHVAELLQEYQMLLQNLADQAQTEKLLALLPVVKILVENYQMQDLLGIADILYGGILPALDGESRMVVQHNLTAMNANRQLGITTGAQAKSSEKLSSGYKINRAGDDAAGLTISEKMRSQVRGLNKASDNAQDGISLIQVAEGALNETHSILQRMNELATQAANDTNTTADRTAIQQEINQLASEITRISSTTQFNTMNLIDGNFTSKSLQVGALNGQVIKISISNMSASGIGVNALLVSTFSSAGKAMSSVQKAISSVSAMRSKLGALQNRLEHTIANLDNISENTQSAESRIRDTDMAEEMVEYSKNNILAQAGQSMLAQANQSTQGVLSLLQMEKNPYLTIMIQSLKKKSAVLDAVIELNIRQKEELENPGLDPDDFDACVEEKAKQIEQLELLDTGFQEVYDKIKADLQTNQQEYREEIAEMQEYIRRLTDKSATIQAQEARNKDLMTQKFASVRKQVKEVRKSQKVVNQYYKSMMKSGYMEPQFTDNKKMLANQGYAAYANNKIMTASPAELTLMLYEGAIKFANLAIEAIDANDIQKAHNNIMKVQRIIEEFQSTLDHKYPVAKDFDEVYNYLLMRLREANIKKDKDIMEEVLKHLRTMRDTWKEVMRTAHASRMPIRITGLNSGLDTEAIISALVSSYNYKTNKYKKAQTKLSWKQDAWKTLNTKIYSLYSSVGNLKLSSAYNLKSTTVSDTTKATVTASNSAPSGTQSLNIISVAQAGYLTGGQLDSSVSTSTTLAELGYTGGDGKINLTKGDGTTTSIEVTQGTTVGSFIASLKDAGVSANFDATNHRIFVSSKETGKDNDFTLTGGNADGISALTKLGLNVKSDATDATYTSYTQYYDADGNKLNQNITDAIAAYKAAQEDYKTKTAQNANLTASYGYASAYSAMMDALKSSGLSDTDQKKLQTLLGMTASQRVDSLMDANGNVYTKSDTDSLGNTIYSYKDENGDTTYIRRMITYEDGSNNVYTKNDDGTYTDGNGHVWKATGGKDTDGNATYSYTADDGTVNTATIKENTNYYEVTAESRGTGYYKYTDGNGVTYTQNDNNTLAGSDGNTYKISSGNLVQIDSDGNEVADGKTVALSACTQSEIQKMVYHQKAAATDIGRAADVLTDLKEANKDTLTDDFVNKMTSNVEKVNAFENAEDTLDSSDSASRASIAAAVKNAYAANGSAGVTTLTNTYASQITTNKTAMEADQEVLDKHAVLSKLVAMDETSAEYATAFADFVSQVQSAHEIQNGTNVTYNSDAKKIDGTDSEITLNGIKYTSSMNTYSINGLSITALQATGVGDTNAISITTSTDTQGVYDKIKDFLTQYNALINEMTSLYNADSAKGYEPLTDEEKDALSDTEVEKWEQKIKDSLLRRDESLEKIMSTMTNSMSKGYEVNGKTYYLSNFGIKTLGYFNAPENQEYAYHIDGDSDDTATSGNDDKLMAMINSDPDTVVSFMQQLTSDLYTAIGDKMKSSTLSSSYKVYNDKEMASEYSDYTDLIKKWEEKLQDKEDYYYNKFSAMETALSKLNSQTSSLSNLFGNMEIESMKSGAAASYQGSAAAASTKTPDTAVQPEASTQAGLSQTADKKPAVQNFFTEKDQEDKNPSEEKDAKQGTQLKKAVNDLNKQMKNSEAIFGIHDKTNRVTIKIIDKTTKEVIKEYPPEETLDMIAKVWEIAGILVDEKLMLALTRKKGESLVINNNIEITVLEIRGDQVKIGISAPKEVPVYRKEVYLQIQNENKAALNATDAMEALKNLFMKANTRLFGEIDIADDKIITLEDGMIGLPEYRNFALIFDEEKEKDKSSVMWFQSMDDPHTAFPVMQPNLVRSDYNPMVNDEMLRPLGGMTEDNTYVLVTLTAAPDPKDTSVNLKAPIVINTDTRRGAQIIVEDDYPVKYKIYDVVKGKKKAEEMRITNNIILHNTTGNINGNKVNVNNLNNQMTSQKKIQRPSENPVIAVRSLRLRTTLSEIDQYYENNIPDAESWMKVTETALANMKTILTDIRTQCTYGASDQITADDRKTILTQLEKLRDQVYAEGNADYAGRTVFTGYRTNQKLTFMTDDNTTSYNITQGLSYKNLEEHRYYSDEVTLPTTAAEVTGNTISNPKQATFDRIRLSYGEIDSITDKDGNALSANGATGTLSYSYTDAAGVTQTDGELKVTVYDTFEDWAKASQTADNTYNITDGEAVFIKESGELILSSDASSTIKSGRASLDVNYTKTGFNKGEVRPEYYYNCTNITDAAKPVEYIKFENGKEIYQDINYVVAANQTLTVNTQASAVFDASIGRDVDAMIEAVKFAQDANNKVEELEKMQKMQEYSSDDCQAALEDWIAAAKKERDYADDNLQKLYNSYIGNFDDYLQKVNLANTDLGSKGQSLDLTKNRMANQQTTMEELKSTNEDRDLSEIIIDYTSAYTAYQASLQAAAKINQTTLLNYIMPSTFFGLNIASSGLSAYQVALNTTANNIANVQTTGYSRQQSNRVASDALLVHQQYGAVGTGVTTVSVKQIRNQYYDTKYWYNQSSVGLYETKLSYLQQIENYFIDDSSSKGFTTILNTMFNSLDTLKNNASDVNTRQQFIGSAQNLATYFNSVSEGLTDIQKGTNDEIKSTVQNINAIAEKIAVLNKQINVIEIQGGYANELRDQRALLIDELSEIVPTEVSEVPITDTNHPDEPTGANYYTVKIGGQVLVDTYNYETLECKARDYKVNQTDAAGLYDIKWSKTGNTFNAGGSSMSGTLKALFDIRDGNNGENFSGLAKVLNSTEVQITNPSITSIVGVSMPEEGILTINGREYAYEGFTFEQDADGNITSYTFNMKRALTAEEQARVDGRTASVGTSIDAMGIPYYMSQMNQFLRSFATEFNNILKKGVDLDGNSTSGYAFFTGTDTVTGEEFSFDGKDANGNAVNGSGSDTYYKLTAANICVNSMIVKDPTKLATTVDINGKGGVDAYDLVEELATLKSGKVLYRGGTADGFLKCMIADISVDTQQSEIFSKNYQNVASAIDTQRMSISGVDEDEEAMDLIKFQNAYNLSSKMVSVMAEIYDRLILETGVMANGFGTLFIGVSGLQSSQNALNTTANNLANVDTTGYVRQQVLFTDRNYVTFNETTAVSKQQSGLGVYIGDVIHSRDVFLDRSYRTESGRQAFYAATYEATNEVETYFQEMEGQAFQDALKDFWTSFQELYKTPDDSVSQNLVVQKAQLFVSRANAVYSGLQSYQYNINTQISDNIDQVNKLGDTIQDLNLQIMKVEAGGIETAMTLRDARDQALDELSALVDISYNETADGIVKVSIEGTEFIDESRCYHIEKKTDKLTGFITPYWGYLSDVNKGKYVNVFDFGSRDISTENKNDMGELKALVLARGDHIANYTDIEGLDQDTYNDTTGMSVMLRAEAQLDQMIHGIVTALNDVLCPNVTAEDTIKNLTNGAATTLDVILADGSTVTLNANTKILDVDNCATGSDKQLPPQELFSRIGTERYTKATYTYQPVDENGNPKVDANGNPVTETKEIYIYNEEDPNDTTKQYTLQSLSVNEALVIDETLLPHLCQNGDVDYALAAKLAGVWDEERLTLNPNDTKACSFKDYYKDMIGEMATYGNVYNSTATSLTGTVASVDNQRQQVIGVSSDEELTYMIKYQNAYNAASRFINVVNEMIEHLLTQLGMASLMEELLGVLEKEETEYLTLIDLADVKSQAIIKADIAKLGEVTEKEQEAASTLLNLSNKRTQVLNDMATVLGKKPEQMTINRMIGYLENQPREQQMLAERRDRLLEVGTKMQTLNHQNEDLLKQAMEMVEFDLTLLKSMRQAPETANYNKNAYNTGDLLGGSGFDAKQMRVEAYNSVAQIYKTNRAAGASAAAKTEKSRDQVEISSIGYDYQIAKQAVAETSDIREDKVAALSAKVKSGTYDVSNEAFAEKLLEKYRSFMLMRAVKKEWLLGMLCVLSGVMLMVMHPVQAQAGQADRAAYRAVFDASYYSAAYPDVAAAYGNNADALLNHFISFGVKEGRNASAEFNPQAYRQRYEDLQAAFGSDMAAYCRHYVAYGKAEGRNGSADGQPVAAVQQADSQAQQTDSQTGTQNNGTAQSTQQASGTVIGTCTTSYVDNIPRATNVALAAQRINGTVVQPGGSFSFSNTILPRTSANGYVTAPIYVSGKKGTGTGGGVCQVSSTLYAAMVYAGLPATERHAHSLPVDYLPAGLDATIAGSYLDLKFTNTFSQPLLIQASANGGTLTVTLVLQMRNRKDSVGAKAAAWVGITLGAVVFFTGAAGVLLMDQAGVYEMSREQFLTKSYQSVADQYAIRALDYSVNMENGAKPENNRWKDTYFRYGIIEAENIDSVDLNESYTYVERNFDEKVTRDKLYCKSYDINEVTRYDYSMTLWGGYSLYTDGGDYAAQVDIEKRCYNADDGIFYYETPDAYIPVKHVSILMLSPDLATGYDYTYDADVGKYLDLHAYSGTYVTFDDADSLSENTGFQTVDWTNSVILDGVTCGELVGIPVTVIGNSDLEQKGSDARTTYQLTDGMLQMNYTAESLHRKYWVVTILPENVPLGWSDDLFVQVTTLTALMYGVRYAIFPILAAAFVLAVFCLVWLVRSAGHHAGEDGITLTWLDGMPLDVYLGFALVAEGFLFLILMEAVNGRNAAAPMLVGVLFCLIAGGWIALLSLLTFAARVKAGAWWKNTVVYMALSVVGRLCGAVTRNLPLFLRAVLVFGIAMMAEALAGTLHTGSSMGAGWRFVKVVEFACIFWGVLQMKRLAEGGERLAGGDMEHPVDTTHMYRDLKEHGEHLNSIQTGMAKAVAESVKSERFKTELITNVSHDIKTPLTSIINYVDLLEKEELSNETAEGYLEVLERQSNRLKKLIEDLIEASKASTGNLAVHLEKLEAGVSVVQIVGEFEDKLNAADLTLLIQKPETPVYVMADGRHFWRVIDNLMNNICKYAQPGTRVYVDLRENGGQVELIFRNTSRYPLNISSEELMERFVRGDESRNTEGSGLGISIAKSLMELMGGSFMLYVDGDLFKVVLGFAQMEEEKEPLDEDKSGKMYNILVCDDEKDIVSALEIYLTADGYQVFTAYNGRQAVDILNKEEIHLVLMDIMMPEMNGISAMVKIREKSNVPVILLTAKSEDTDKILGLTVGADDYVTKPFNPVELQARVKSQLRRYMQLGGSTKQERDVLAIGGIELCDRTKEVTLDGEPVSLTRTEYDILKLLMEHPGEVFSPNQIYEQVWRDNPYGTENTVAVHIRHLREKVEYNPAEPRYLKVVWGRGYKMEETVMFRMFWYEIKMDFLRSIRYRFGMISDLLVYFALFTVFMVTDSGNSYAQTYHYGNYKELVLLGYVAWIYAISAISNVAGSLQSELTHGTLYKKVSSKYPLQYLFGGLYVSSVLLETITIVIVVIISKFVWGIEFSFHPAFLVPILLESLGMYGIGLIVAGIAIYFKRTGTIVFLIQTALLFVTDTVPTSDAILKITHYIPLTRCNEILRQIAVGGEYTGMLPGLCIVALVWLVIGSVFFDVMLKQAKKRGNLLFYMIKVEHVKKSFKEKEVLKDITFEFLPDRVYVIIAPNGTGKTTFINTLCGFMLPDEGTISFSDGMDEQGFDVILSGERNLYVKNTVYENLIYFSMLKGMSKSTADAAIAWEKEKFPIYEMVKNKLVETLSYGQKRIVSLMSAVVTGAKCVIIDEATDGLDIDNRKLVADTIRSVRDGRSIIVIAHDFSFASDVADTLIFLKDGRFAEVVENGREEEIGQIYKKLYHGEERADVMKIRRKHPVRVNHLGSDPIPQLVRRLALPAMLAQFVNVLYSIIDRMYIGNIADVGDIALAGVGICGPIVTMISAFAAWIGNGGAPLLSIKSGEQNKEGASAILANCFVLLIGMAVCLTIGAYLCKDALLVWFGATERIFPYAETYMRIYLIGTVFAVLSLGLNQFIICQGFSNLGMVSVIIGAVLNILLDPLFIFALHMGVRGAAVATVLSQAASCAFSLYILFRGPVPVKITFRGYSLPVCRDVLTLGLTPFLIILFDNVLIIVQNVMLKNYGGADSDMLLTCNTIVQSFMLIITMPLGGISGGTQSVLGYNYGAGDTARIRLAEKHILKTALLFCTIMFVFAQWDVSAGIFVGLFTQNAAYRSMTVHFIHIYTLSVIPLAVQYALVDGLTGMSLVGASLPLSFFRKGIYIALAVFLPIRFGAPAMFYAEPLSDVAAAAVTTIVFVTVVPGLLRKREALLGKHIEKMRTQSVECSKLGKTRIITDASCGMVRNTGFCGQNLPPHVYLELLSIYFLMHLEIRIKKWGISKQPVFASAVIRVFPSFEHSTGVSAIRRQFMLFKKLSAPSLKELFVAELEGMILSGKLEIGAKLPPERELAESMQVSRAVVNSGLDEMEKKGFLVVKPRIGTFVADYRKYGTADTLVSIMQYNGGMLRDKEVRSILEVRIMFMNLAATLAIDNADDASIAGLEQYVTALKACEDPEEAASLIFDFSHELSFIGGNSLLPLFFASFKDLVTNLWVRFASKYGAAALAESAEQIFIHVRDRDKDAAIRYITDSTNESIDGCRQIYTMKKKDQVTAAEEQKEAVQVKGKKRRAREAQREIRWDRLDNTAHLFPVIAGESMSNVYRISVTLTELVDRELLQQALDMVLPKFDGFNLRLRQGVFWYYFEENGKPAPRVREESAFPCRYIRQNKNHSYMFRVTYYKYRINLEVFHVLTDGMGGINFLKELTYQYLRLAHPKLREKVGDSLSSDTSLNREDSFLKNYKHSSQKGYQTKRAYLLKGEKLPPGEFGVMHGYMKIPELKKVCHAYGVSINEYLVAVYVWSVYTECMHGMPSERPVRVAVPVNLRPYFNSITTKNFFVMVSAEFHPTKEIYTFEEVLKSVSESLRSQISRENLEKLFSYNVSNEKLLAARIVPLFLKNLAMRYVYTTSALANTATVTNIGNISVSEEYRPYVEMFHAFLAMSKGQHLKGTICSYGDTLVFSFSYDLTDTSVQRGFFRKIAADGIAVEIETNGVNYEMSRCKQCNVEILDETERCPLCHSVLEKTVEVENMYPNVRTMTRRLALLSRIYLFVAILVEALLIYLNVLSDSEMFWSAIPGLAMLYGYLVLRYAILGKSGYKGKIIVLTLIAILMVVAIDFVVGYRGWSVNYALPSAILLVDAGILVLMCINRRNWQSYMMWQIFMILCSVVPLVLYAVGIVTAPILALLAFAFSTALFLGTLIIGDRRARTELRRRFHVRMRENEASIRGRVVRDLIAHTTNDLLIGKKIKNGELRKQIGTAEPPWKCPECFTMQTIEMEHFTMELLESKENANRDKIILQLHGGGYVGAMRNAYRMFAGLYNEVSHGMSVLTPDYRVAPEHPYPAALEDAVCAYEWLLAQGWFSEQIIVAGDSAGGGLAMALCHYLINHGRQLPCGIIAMSPWTDLTASGESYDTNYERDPLFGKTRDSLIYNRDYVGDHDPMDEYISPMFGDFRGFPPMLIQVGSYEMLLSDSVDVAAKARGQGVKVRLSIYDGMFHIFQMAAKMLPESRKAWVEIGKFIEILLREMNQKNCMVAQSGGPTVAINASLAGVIDGVSASSMYDTVYGSLNGITGILNDDLLNLTELMDGHPEYLSRLAQTPAMYLGSCRYKLPHYLDDDSPYVFIFKQFETYHIEAFFYIGGNDSMDTVLKLSEYGKRIGSSVRIIGIPKTIDNDLCETDHTPGFGSAAKYIASSLLEIAHDTFIYAVKSVTIVEIMGRDAGWLTAAAALARNGYNTAPHLIYLPEVAFDPEDFLLDVKRLLFERNNVIVAVSEGIRDASGNYISASEQSIDTFGHSQLSGAGKTLEFLVKEKLGVKVRSVEINVLQRCAAHLASQTDLGESFALGKKAVALSEEGVTASMVTIERTSNAPYTVDYSYAEIRQIANEAKSVPREWINSAGNDIEQPLLDYLAPLILGESQVSYHNGLPVYMDVSHLSKHMKMCTLCPRNCAVDRAGGERGICGQTEQLKVARAALHYWEEPCISGESGSGAVFFSGCALHCVFCQNRSIANGTAGKEITKERLAEIFLELQEKGANNINLVTPGHFAPQITEALRRAKKEGLRLPVVYNTSSYESADTIKSLEGLVDIYLPDFKYISPALSAKYSHAPDYADVAKAAVAEMVRQCPRPVFDGDEAEDPIEEGLLMRQGVIVRHLLLPGCTRDSKAVIKYLYETYGNQIYLSIMNQYTPLENVSAYPELNRKVTDEEYEEVVDYAIGLGVEQGFIQEGETAEESFIPAFDGEGVMGFQMEMQVEIRFKKCGISNQPDVCICDDPCLSKFGALRGSCPHPGDNLMGVISNITGSTLGDFMWKCRWKFVGEKCEHFFRLNVCIGFRVSSTFGQSDGCMSGTPETMGGLSGVPNGTSSQTIMEKKIEIIAVDFDGTLCSECYPAIGMPNLPLFALLKGARRQGKKVILWTCRCGDLLEEAVAWCRMFGLEFDAVNENVAQTLEQYGTESRKISADVYIDDKACWPWMTKQEWERYLAGMKTVDMELILLCALMAAIGAFGLVTGVVLLFGIQFQECNAALLTGIVCGLWGILWGSLLIQNRNLVSKNVMNHFIYRKKRKILLAAISMGVLAASISAFHGPEAVYAYTATAGTINDGPVKVRNAPVTGDKLTLLYPGNAVTVTDETAGSDGYTWCQIQMSDGVTGYIRSDFVTLQGTDSSAGQTNADSSAGGTNGVVQNTEKGVYVRSGAGTSYSVVTKVYKGQAVNVGELVSAGGMNWYSVTLVVGGASYSGWICADYVAVNGQTSDDQSQGETTGATDSEYEAALAAAGFPASYCSALASLHQKYPNWQFVPVQTGLDWNTVVSNESLVGRNLIQNSVNDARKSTDSQAYNWETNKWYGFDGASWVSASPEYIAYCIDPRNFLNENQIFQFETLEYAGYQNAAGVQSVLSNTFMAGNYTDTDGAVRSYADTFVEIGSNVGVSPYHLASRCKQEQGVRGTSDLISGRYSNYAGYYNYFNVRAFTTGSASAIVNGLEYAKLQGWNSIYKSIAGGSSVVADNYVKKGQNTIYFEKFNVVYTNSLYAHQYMTNVQAAMSEGTNMGKAYTDKNQAFVFRIPVYQNMPESAVTFADKGNPNNWLSSITVDGYALTPAFSGANTSYSLVVPDSAASINVGATAVAGTSTVSGTGNYSLNYGDNTIQITCISQSGDSRTYTLIVARAGGSAGGTIQVADDAAITPFYPIGTYVTGIEPGTSASTVASGIGTQNCTVKILNADGSENTQTVGTGNKLAVYVGDTLVQQYEIVVYGDINGDGKVSNLDLVLMQKQILGIESQSGSRLEAANVSKDGGISNKDLVILQKHILGISQIDQMKKKIAMMMMALSLTFGVVGVPQTVFAASGSTSVSVSSGSVNIGDTVTVTVKASGPSGEKANATMTLSYDSSVLQFVSCNTTYGGGGGSVMATGESYTVTLKAVSAGNSSLSVSANDGVIFDSNEEMDSMSGSSASVTVKNAASTNTDSGNNSSSNSGTSNGNGTSAGGNGDSAANTGETTGKQSADNSLKELTISPGTLSPAFNGKTLTYSATVGSDVTNIAVSATPVNEKAVVESVTGNTNLKSGDNTIKIVVKAENGVTATYTVNVTKQGTSSGETTASDEGEVETTEETDSSENTVTVNGISYVIAENFATENIPADFSETTVNYQGADYRGVSYDKGSVVMLYLVQDGAEESTGSFFVYDSTRGTLYPFVKMVNGEHYVIALLPPVDYTMPDTMQQTQLTLADGSLVTAYQETQEEGSEVESEFYTFYGVNSDGTEGWYQYDSIEETYQRVNTGTTVSSDGLQDEDAAYLQEEYLALSEKYKKEKAFSRTAIGILIFLLAVMAVVLVNLLLHRREADRDDLDEDDTMDDGVSEHDDTEELLDENQDDVIEEPEKDSRKKWHWKKRSAADAGDADEFDEQEEREEKTKTQESDDDAFDDAFDEDDIEEEEPPKKRFGFWKRKSDDLDDDLFDDDEDAYEDEDAYGDDNDTYEDSDAPDDEKVSGGEEKAAARKPAGDGRTAGRKERRTRAADEDAADEPENEPLYEEKHPKKKKSGKDQKNKQDDELDIIDFNDLMQTVYTAKAKKAIDIATRISKSLHHSYIGTEHILLGLLKEGTGVASQVLADNGVEYDKVLELIEELIAPGNAVAVLEDGLSPRAAHVLEVSKAEAARFHSEKIGTEHLLIAMIKETECVASRLLNTLSVNVQKMYVDTLIAMGEDVSQYKDEFQNGKPGKRKNAEGTPSLDQFSRDLTELARDGKLDPVVGREAEIDRVIQILSRRSKNNPCLIGEPGVGKTAIVEGIAERIMGGMVPDTVLGKRVVSLDLSGIVAGSKYRGEFEERIKKVLAEVAKAGNVLLFIDEIHTIIGAGGAEGAIDASNILKPALARGEVQVIGATTIEEYRKYIEKDAALERRFQPVVVEEPTEEEAISILKGLRGQYESHHHVTITDEAVEAAVRLSARYINDRFLPDKAIDLMDEAAAKVRLHVGGDPREAAELRREIAESQETLEQALSGGDLEAAREAQTKRQELEEKLEKLNAKAKQGGRRHHQTVGEDEIADVVSGWTKIPVKKLTEGEAARLKKLEATLHKRVIGQEEAVSAVAKAVRRGRVGLKDPKRPIGSFLFLGPTGVGKTEISKALAEAVFGQEQAMIRVDMSEYMEKHSVSKMIGSPPGYVGHEDGGQLSEKVRRNPYAVILFDEIEKAHPDVFNILLQVLDDGHITDSQGRKVDFKNTIIIMTSNAGAQAIVEPKKLGFASGNDEKQNYERMKGSVMEEVRRIFKPEFLNRIDETIVFRALNKDDMKQIVGLMTKELAKRCETQLGITLVVRDAAKQYIVDKAYDPKYGARPLRRKIQDEIEDPLAEKLLDGSIRRGDEVIVTTKKNAIFLEPKKKMAVISELLRSEEDGTISFGDYTLSTKAKLDNFEHQGDLYKVKTCQEITKLERNGMFVYESVPGTAVEHLKATDTGMEFSVEGAEDAQVTVELEDEAEYDIVIDGADAGRMKTNLGGKLSLSVELGDAPVKVSVQKCMLKRESRAFYGEKSPVRAAAASAGKEDKNMAKGKTTVYFCQECGYESAKWMGQCPACHEWNSFVEETVEKKSARGNRSADSSREAKAVPLSQIEMTQEQRVSTGMKELDRVLGGGIVQGSLVLVGGDPGIGKSTLLLQVCRNLAEHKVKVLYISGEESLQQIKIRAERIGTFGDSLSLLCETNLDTIRRVIDREKPEIVVIDSIQTMYNEDVSSAPGSVSQVRESTGTLMQIAKGLGISIFIVGHVTKEGVVAGPRVLEHMVDTVLYFEGDRHAAYRILRGVKNRFGSTNEIGVFEMRGDGLTEVENPSEFMLSGKPEGASGSVVACSMEGTRPILLEIQALVCHSNFGMPRRTAAGTDFNRVNLLMAVLEKRLGLSLGNCDAYINIAGGIRMNEPAIDLGLVLAIVSSYKDRPIDEKTICFGEVGLSGEVRAVSMAEQRVLEAKKLGFKTCILPEVCRESLKEIKGIGLVGVRTVKDAMDYVMRMTERKIALSIEEAADYTGIGRNTLRKLVEWKKLPVLKVGRKVLIKTDILEKFMEANEGRDLRDKGNVKTVTRNVATMAKSTKTYEERIRALEKKEQESIEATKKLIAQRKELEKRKKAEESKKRTHRLCQIGGAVESVLGCPIEEEDLPKLIGFLKRQETMNKTISMSIRVSEEELDKLKQAARLEAYASYSEFSMDLKKPLTFDEQLDKLIAHGMIVADREKAKDILKRVNYYRFTGYALQFRQEPSGSDYIEKTTFETVYHLYKVDEILRDTFRRYIEKAEVYYRTQIAYGFSIVKCTEAPYDQHYDENNFYNKKGYKEVMESFSREKNYYKDSLIVKHHKIKYSSKMPLWVIVELMSFSNMSKLYSSMYYSEKDAIAGMVGVGKDTLENHLHCLSVLRNKCAHAARMYNTDFNPPAKFTSSFLRKHPEIKNNSLFAYTLVLLKRLPDESSKKSLIQTVKTVIDEYRDDIDLDLIGFPENYLEIMENNLMQPLCKVQLILQLLMMKMCKDMRTYDKIYKEENVTVKSQKAQKMANKSNDLAHTKWMCKYHIVFTPKYRRKIIYNQLIKEDIRDILNVGLSNICYTKLNKILMRTFDDMLSNQLKDEEFRKEYEAIQPEMDVIRAIVDARTSQNLTQKELAERTGINQADISKLENGTRNPSVNLLKRLADGMGMALKIEFVPKQKAMTDFELIAYEKENGEVPVEEFLNSVHPKMRAKIYGLMGILQEKGNMLREPYSKHLEDGIFELRCKFGSDITRVLYFFYYEGKIIMTNGFVKKTQKTPKEEIQIAKDRRKDFIERVMKDENIMIIFDKCDMTKFFIIRKEKVAYMEKMDKVLEEVLEYLKHKRVITELEKDILSTAQICQTKPFNRQAAEKKIVEINVKYTEIYSAVLITPGINPKPLLVMEDGEVWDSLYLQLRALCGKELVVIGEEKMGWRFMAMTKDVARGRSNPPQGRNPERGYAFCLVMGETMQGIFMKYQSVAILGAGAVGSYVMWGLAKKKEIDLCVVASGERKARYERDGFVINGQVYHPAVRTPEEAAGVDLLIVATKYQALRSALGDIQTVVSEHTTVMSLMNGVDSEEIIGEIIDPVQIVHSLIKVASERKGNQVVFDPETTIGIIYGEADLSRGTGRIEALNDLFADTGLHYRATDVILTEIWSKFRLNVPNNQAQAMVGCGVGAYRDSEHVAFLRDRLREEVDRIAEKKGIDFDKADTSSTFGSKVRDRARYSTLQDLDAGRHTEVDMFAGAVVRMGRELGIPTPYNEFTYHMIKALEEKNDGKFDYEMPENTSIIFFDEYKKLDKLCSEMYGINSGGVTCYLNDMMAVPVMQRNRIPEWNQTYDRLRELRHIRNQMAHGEGSFEDYPCSEEDVLWLFEFRSKIMHISGPLAVYRRQTEESMHATRVKEDFPRAVDQWQTEESMHATHAKEDFLRAVDQRQTEGNVTDHQRMKMDNVEVIDQEENDSFEKKHSMLKEIAVFGLIVLIVAAAVLIFGNVYMKYFLLSMRRKAVRSELEDAKVQKIMQEMERAMFFKEDTTFNDIRDKSLQQWLDEMEQHEDVAVRGGVKLTREYVQYLKDEIGRLRHENEVKNAYLKKLREKRMLYYREISLKDQRKCLLKNAERADAAAFLHYFTQAHAETDFLTTYADEGTHSVEDMEERLAAQKASRTEIEICAFVDGILVGSAGNHALSTREKLRHRADFGISILREYWGQGIGAALTGACIDCAKEAGFRQLELEVVGDNETAVRLYKKYGFVEYGRNPRGFLTRDGRWQELVLMRLELEDTDAQKNNTVMNAIVARMEERITDTSLIVENRNTCDDNSPTVPLTEKQIAELRACAAKMETEDGTGTGKVTVYPVFSGIELYYNDMHMAYCNKEQKTVYGTALFSYMKRIDFEHGTITGNILGAALPMLVAQLLSLLYNIVDRIYIARIPDVGTTALGAVGLCFPIIVIITAFSNLFGSGGAPLFSISRGGGDTKKAGQIMNTSFTMLCAGALVLMAAGLLFAAPILKLFGASDAALPYAYPYLMIYLLGTLPSMIATGMNPFINAQGYSVAGMLSVAIGAVTNFLLDPLFIFVFHLGITGAALATVLSQTLSALYVIRFLHRRAEYKVRLLRPAEWKSSLVEAKNIISLGTAGFIMQLTNSLVSIFCNNVLGATGGDVYISVMTIISSVRQMVETPIYAINEGTSPILSYNYGARRPSRVRKAITALAVLILLYTAVMWSSIILAPRALIGIFSSDAALVADAIPALKLYFAAFIFMDLQYIGQTVFKSLNKKKHAIFFSLLRKVFIVVPLTYLLPYAFGMGTDGVFAAEPVSNVIGGSLCFITMLFTVLPELKRMEKEAMRYQIRHARVQFGGNVILRDVNFEVHDREKIAVVGRNGCGKTTLLKLIAGDIEMSNPDSDEECGITMAGGQEIGFLRQVNFVDAEVTVEDELKKVFVPVFACEERMKELEEQMKTAAETKETAPDGALLREYDRLQKQMEAMRGYSWRRDMETMFQRFGFALEDLRRPIGSFSGGQQTKVAFIKLLLTRPDIMLLDEPTNHLDLPTIEWLENYLKGYDKAVVIVSHDRMFLDKVADVTYEIEYHEMKRYPGNYTYFMQRKQEDLIKQEKDYEEQQKEIKRLTDWIEKWKNTPTKVAATRSKRMAIEHMVKIEKPRRFDTRAFHGRYTPRIESYTNVIQAKDLSIGYDAPLAEVSFLLQKKERLAIIGENGKGKSTLLKTLIGEQPALGGSFKFGQNVEWGYFDQQKAVMEQAPPQQTVLENFWAAYPGYLREEVRSALGGFLFSGQDVEKKMGQLSGGEKVRLALCKMLQTRPNLLILDEPTNHMDIIGKEALEQMLREYEGTVLFVSHDRYFISRIATGILEFSGDAVRQYAMNYEEYLAEKQKCAGGVAANAGSAAGRNAGSAAGQGADVRGAADAGSVPTLSDVFDKKAYYNPGKVRSRLQRQKEKYERMLAESEEKLAELQMQMLDPALASDYPKLMELQSAVDAEEANQDSLLERMLETETELAEYEEAMGEEKRGNLRREALTVQKGFGIIQKSSKQEFIGRDMKFHGKERPRQTAVAFALMATIDLSKYGITGTTEVVYNPSYEMLFEEETKPELEGYEKGQVSELGAVNVMTGIYTGRSPKDKFIVVDENSKDTVWWTSDEYKNDNHPATQEAWNAVKDIAIKELSNKRLFVVDAFCGANKDTRMAIRFIVEVAWQAHFVTNMFIKPTAEELENFEPDFVVYNASKAKVENYKELGLNSETAVMFNITSKEQVIVNTWYGGEMKKGMFSMMNYFLPLKGMASMHCSANTDLNGENTAIFFGLSGTGKTTLSTDPKRLLIGDDEHGWDDNGVFNFEGGCYAKVINLDKDSEPDIYNAIKRNALLENVTLDANGKIDFADKSVTENTRVSYPIDHIQNIVRPISSAPAAKNVIFLSADAFGVLPPVSILTPEQTQYYFLSGFTAKLAGTERGITEPTPTFSACFGQAFLELHPTKYAEELVKKMEKSGAKAYLVNTGWNGTGKRISIKDTRGIIDAILNGAIKTAPTKTIPYFNFEVPTELPGVDSGILDPRDTYANASDWETKAKDLAARFVKNFAKYEGNDAGKALVSAGPQAMSDTFRGLSKRGRDTESDAKIRQEEMYAFFSTNVPATFPSEIEGHDLFSIIVLTTMGQPLFDLISNIIKRRSYPSISDGMHLEIRIKKCGISTPSVFASVMIHVFPSFEHSTGVSATRRQFMNIKKKILGITIAPVITLGLISMFLTTTMVRSAMLEEIEEALRGTAAATLAAYDQNTGDYLQTSNGDIWKGSYNISKSESLVDRIKGNTDMDVTFFYGDTRIMTSAVDAGGNRILNSKAGDRIVEKVLQGGESYFSHAVSIEGTLNYGYFIPVYQNGSTDEIIGMIFVGTDKQEKDAVINKILGTISMAVCAVMILCIAIGMKLATSMSRNIRSSIEVVGKVADGDLNVWVEDKLLGRHDEIGDLSRVTITLRDAMKATIQEISQNAKRLLDASELLGTAADQTNGTMDHVRMAVNQIVENSTEQAQNSQNTSEHMRIMGENITETSAEVELLDDNAASMQQSSEKAAETLNNLRNINIEVERIIGEVQEQTNRTNDSVQKIHEATAFITSIAEETNLLSLNASIEAARAGESGRGFGVVADQIKKLSEQSNESSKEIEETAKTLSEDSAKAVEIMQQMQEIIMNQSASMQDTQKVVEEVIAQIGSSMQSIRQIKESTGHLESSRNEVLQAVSELSEIAQGNVDSTKKTYDETEEVVDTFKQVYVSAEQLREIADELVSSIDYFKMQMRKKWIRLIAAAVESFLLAGCGADTQIDDYATNAGAESLQQTAGTESAATTTATEGIPKDEIKVGVLHLSDPAEGSGYTYTHDLGIQGMQQNLGLSDDQIVRKINVPDSDEDATKQAIQECIDEGCNIIFTTSWGYMEPTAEMAEKYPDIYFSHGTGYMSNGKNFNNYFGRIYQARYLSGIVAGMNTTTNKIGYVAAMDNSNSEVTGGIDAFALGIYSVNPDAEVYVKVTNSWYDPEAEENAAKTLLDMDCDVIAQHCDTEYPQTLAEERGVYSIGYNSDMSKNAPDACLCSVIWNWSAYYTAAVQSLIDGTWDGSNYYGGMNENLVGLTNLADFCAEGTQEKVDEAKEQILSGQNGVFDGVIETNTGETVGEAGKTLDDATITGGINWYFKTVNVVEMKFAIKHEIKGRMRIHVAQYRMSCAQADTLLYFLQNDIQVSSAKVYERTGDAVICYDGSRAELIDKLRHFHYEDVEVPNGLIENSGRELNASYQEKLIGRVVRRYASKIFLPYPIRACWTTVKSFRYIWKGIKTLAARKIEVPVLDATAIGVSILRGDTETAGSIMFLLGIGELLEEWTHKKSVGDLARTMSLNVGKVWLKKDGVEVLVGAKEVREGDEVVVHMGNVIPFDGVVTDGEAMVNQASLTGESEPVRRISENYVYAGTVVEEGELTILVKAVGGSSRYDKVVQMIEESQKLKSGLESRAEHLADRLVPYSLGGTALTYLLTRNVTKALSILMVDFSCALKLAMPISVLSAIREASFYNVTVKGGKYLEAMAEADTIVFDKTGTLTKAKPTVAKVVSFNGDSPDELLRIAACMEEHFPHSMAKAVVEAAREKGLDHEEMHSKVEYVVAHGISTTINGRKAVIGSYHFVFEDEGAALPEGTKELFESLPEEYSHLYLAIEGQLAAVICIEDPLREEAEAVINSLRRSGIKKIVMMTGDSERTASAIAKRVGVDEYYSEVLPEDKAGFVEREKAAGRKVIMVGDGINDSPALSAADVGIAISDGAEIAREIADIMVSSDDLYQIVTLKLLSDGLMKRIRKNYRVIVGFNTGLILLGVGGVLQPTTSALLHNTSTLVISLKSMQNLLSMLKCFEKIDWKKTGIFAGGVLFGTAGIKVLSSKDAKKVYTSCTAAFLRAKECVMNTVSTVQENAGDIYAGAKEINEERAAKAEAEAFADAEAEAAEKTETAENTEEMNNRTFYNEVLTDHNRYPGHKEKLADANLVLEGVNPSCGDDIVLQLRVEDGRIAEGTFTGDGCAISQASVDIMLDLVIGKTKEEAMHLADLFFRMIKGTVSDEELEELEEASALVDISHMPARVKCAVLGWHTLTEMLGDEPEEKMTDYKKDFPLLAESDIAYLDNAATEQRPACVLDAEREFYERWNANPLRGLYELGVEATEQYEHARERVARFVHAKSEREIIFTRNTTEGINLVAYSYALPRLKPGDEILVTIMEHHSNLLPWQMAARRTGATLKYLECEPDGSFTEEKIRDAVTPHTKLAALTLVSNVLGRATPAEKLIGMVHENGGVVLADAAQAAPHMPIDVTALDADFLAFSGHKLMAPMGIGVLYGKQELLEEMPPFLTGGEMIDRVTREGAVFAELPHKFEAGTVNAGGAAALAAAIDYLEFIGWKEITEREEMLTAQLLAGMKKIPGVHILGSGDEKEHCGIVSFTVDDVHPHDIASILDEAHVAVRAGHHCAQPLLEWLGISSCARASVAFYNTPEDVGRFLDQLAQVRRMMGYEMTKQNQTITVNRLPAKTWNWLKMNETVIGMPRIDGSIAIKQSVAEAGQAEAEQLRMAQQTDWDKITTGMGEAMDQPSEADAAWDTELLAIPEHADCGEPYVYRFSYQSGQHAYNRLHIYAGAHSRAKVILLCESGEPGGMMSAIQTKVYAGEGAKVELYVVQTMNAEAVCLHDVGVSCEKDAAVKEVQLELGGAEVYTGTLFELSGEESTAELVSGYLGTGRQKIDMNYVARHRGKKTKSNMQISGILKNEAKKLLRGTIDFVHGCVGAKGDEKEDVLLVGDNMVNQTIPLILCAEEDVEGNHGASIGKLDENMLFYAATRGIPPEEAQRLLTLAKIEAINSQIPSEEVRGAVDTYLKEQCIMKEKTYVEDIDRSIYDVKDEERDAYKVDEGLTEAIVEQISREKKDPLWMELFRLQALQIYNEMPVPDWGPSIEGLDMSHIVTYVRPNTKMTAKWSDVPQDIKDTFERLGIPQAERKSLAGVGAQYDSELVYHNVREEVAAQGVVYTDMESALKGEYADMVQSHFMKLVKPNDHKFAALHGAVWSGGSFVYVPPGVSVMIPLQSYFRLNAPGAGQFEHTLIIVDKGAYLHFIEGCSAPKYNVANLHAGCVELFVEEGATLRYSTIENWSKNMYNLNTKRALVKEGGRIEWVSGSFGSHVSYLYPMSILKGKGAHMEFTGITFAGKGQNLDTGAKVVHAAPDTSSYMNTKSISKDGGISTFRSSVSITKEAAGSKSAVSCQSLMLDDISRSDTIPAMDIRTGDADVGHEAKIGRISDDAVFYLMSRGISEEEARSMIVSGFASNVSKELPLEYAVEMNNLIDLEMKGSIGMAEQILQVEGLTARVEDKVILHEVGLTIKKGETHVLMGPNGAGKSTLGYVLTGNPKYSVTEGKILFKGNDITEEAADKRAKAGMFLSFQEPLEVPGLSLESFIRSALSEQGRNKMRVWNFRKELKAAMEVLHMDPSYAGRDLNVGFSGGEKKKSEILQLMMLKPDLAILDETDSGLDVDAVRLASEGIREYQKENPDGALLIITHSTRILDALHVDATHIMVNGHIVASGDASLVDKINREGYEEYEKLAQKGEDERMVGARCGNFFPAAFYIQFRVFPRFDNPQDVSDKPQTIRGLFSVPNITASQTIMGRYYRLSKKLTEDGSREVQREMREIADVEDVSIKADERMLFVVTKDGQFSDVMSRAVNICSRVANGAELSFARFAEAMGNNMELDYEMFCYQCEQTANQKGCTKLGVCGKTPEVANLQDLLIFQIKGISCYAKPLIEKGTPMDKSVVSFIENVLFTTLTNVNFDAEVHVELLRESQRIKEELRAYAGAPSQPTLHATYDLPQTKTEMLRDAPIAGIMYDKSLDPDIRSLRQTVLYGLKGISAYGHQARELGYYSDEADDFYILALEALTDDRLSVEELIRLTMRTGEMAIEVMKKLDEANTAIYQNPAPQKVNVHLKKGPFIIVSGHDLKDLEMLLKQTEGTGIHIYTHGEMLPCHGYPGLNKYPHLAGNFGGAWQDQQKQFDNLPGCILMTTNCLMRPRDSYKDRIYSTNVVGWDGVKHIGKNENGEKDFSAIIEQALELGGYPEDQDVQEILVGFGHHATLGYADAIVDAVKSGKLRHFFLIGGCDGARPGRNYYTEFAEMVPQDCLIMTLACGKYRFNKLDFGEVAGLPRLLDIGQCNDVYSAIRIATALADAFGTDVNGLPLSLIISWYEQKAVADLLALLSLGIHDIYLGPTLPAFLNPNVLQYLTDTFHLKSISNARDDIRTCLGQAVMLETFQKIWKFAGDERDNINKSIVFCFINAVFGMFEIAAVYLAVRALTGEGSGEGIVWKTVLLIAAGIIGKAATKTFSQLEQTHAGYFMAGNKRIAIGNQLKSVPMGYFNENSLGEITGVTTTVLENVETIAPMVLVGLFAGMINTIVFNVMVLVYDWRAGLLVVAGTFVYLLIVSKMEKKSRVSAPKRQESEAKLVAAVLEQVQGMSVIKSFNLVGRGDRRIQEALEYNRSSNLELEQLFTPYTIAEGLVIQLFSVLMMVEAVVFYLNGTLSMTGALMFTILSFVIFAQIQTAGSSLSVLRLVSSSIEQANRMDEIPQMDEKGSDITPEHHEIAFHDVHFSYEKKEILKGINLTIPDKTTAAFIGPSGSGKTTLCNLIARFWDVDGGSITVGGRDVRDYTLEALMNQISMVFQNVYLFADIIENNIKFGRPEATHEEVVAAAKKACCDEFIEALPDGYQTVIGEGGASLSGGEKQRISIARAMLKDAPIVILDEATANVDPENEERLQRAIEELTRDKTIIMIAHRLKTVCHADQIFVVNDGGIVQRGTHEELIGQPGIYADFVSGRKEAGSWKLMKQQSPLLRIWELGEKEHGRLIGAIVLAAVGVIGGMVPYFAAAKMVALLMSGERDLSVYLIWGGAAMAGYAAKTLLYTFALSLSHAATFAVLKEIRQKILEKLPRLPLGTVIDTSSGKLKQIIVDQVDGMETTLAHLLPEMTSNLLGPVLILIYLFVLDWRMGLLSLISIPVGLLCVMSIMGSYEKDWNDAVRTTQEMNETIVEYIGGIEVIKAFNQGKNSYAKFRDRVLANASYYYQWMKRCQFQMSLGYAIAPATLITILPFGWIFYRNGSLSAEAFLTIIILSMGIVGPLLAAMSFVDSLAKVGTTVANVDGILKAEEQQHEEKPAELFGSEIVMEHVSFGYHEEKEILHDISLKIPMGTMTALVGPSGGGKSTIAKLIAGFWDVNQGKIMLGGVDEREIPLTQLYDQVAFVTQDNYLFDDTIRENIRMGRVEATDQEVETVAKAAGCDEFIRGLENGYDTRVGGGGAHLSGGERQRIAIARAMLKDAPIVILDEATAYMDPENETKVQRAVTKLVAGKTVIVIAHRLSTITGADQILLIQDGTLAASGTHEELLQKSALYKEMWQAHLGVKEENQTCMAKQIEGVYERILACAKKEFLQMGFAEASLRVIASEAQTTTGSIYTRFGDKQGLFEAIVGTAAEGMRKMFLATQEEFDGYEPAVKEETVYSYSSGAIDTLVDYLYEHFEEFKLIVCCSAGTKYEHFIDELMEYEVEYTYRYMDSIGCESIRSGLVTEDFIHMIGTAYFNGMFEVVRHDMSRAQAKKYIHMLEVYHFAGFDTIFHPEKYLMAITTKDLAQLCGVSRTTIHRALNGTGRIKPETKEMILQVAKEHGYRPDLLATGLAKGQTYNIGVVVLDVKNRYFAQMLSTISTEAYARGYGVNITLHGGDAGTEREQLTRLADYRVDGIILSSVNEGEAYRTFLESLHRPIVSVDNRIADGIPFVGIDQRAAVREAVQRAAEKGYERIVFVCPPLDTKNRQNLYVHKERLLGYEEEMKRYPALRPECILSWDYLQKVDAILKEGKRTAFVCTADEYALEIMKDQKRAKRKAPVDYGITGFDNIDTLAYVTPQLSTISNVVDEVAKSAVEMLFAMIDADPEVEQMPGAGQRILSHRYLEGETLMRHVTIKADTAFTKGRIDDRIYGSFVEHMGRVVYTGIYEPSHKTADENGFRGDVLQKVRQMGVTAVRYPGGNFVSNYDWRDGIGPVEKRPRKRDLAWKSIETNEVGLDEFMKWADAAEVAPIYAVNLGTKGIEEALAVLEYCNMETGTYYSNLRAANGHEKPYGIKTWCLGNEMDGDWQIGHKTAEEYGRIAYETGKAMKILDPSIELVACGSSMSTNPTFGDWEQTVLEHCYPCLDYISLHQYYGGQEKGTAEFLAQSLDMERYIETVLNICDYVRVKKKMSHKINICFDEWGVWSMSDVQVQKSVEDAPWQTAPAISEQIYTMEDALLFASMLMNFIKRADRVKIACQSLLTNISSCIMTEEDGGVWVQPVYYPFALMAKYAHGVTLDTRYTGDTYACSTFETVPCVDHVLVYDGQKHEVTVFFVNRMEESAEATVSLQGMEPETVLKSIALFHEDKKATNQKEHDCVTPVELENVSCSGNEISVELVPLSFQMVQIRLKMRKISAQRVIGTLVLLLFAALVLLPLFWLGVSAFKSDADVIKWPPIFFPTEWVTTQFAYVWKVLPIARMLLNTVVFAGGVTIISLFFDSMAAYAFARMKFTGRKLLFGIILLTMMIPFQVVMIPLYMEEYKLGILNTFLGLILPRAASAYGIFMLTSFFSGIPKSLDEAAKIDGMGEWKIYLKIILPLAKPALVTLGIYHFMNNWNDLLYPMMLTSSVEMRTLSAGLAILVGSNSIKYGPTLAATVIAILPLLLLFLFGQKFFMEGIATSGMKEMEHQVKAYAFIAPSLLILTVFVFIPLAGAIGISLMNIDIYMKNISFAGIANYIKMFQDERVANATFHTFYFALLEVPLQMIVALLLLMFMLRNTKLHKLLRTVFYLPYVCSMTAVSIMWSMLLNTHYGMLPHLLGKIGITMPNMLSSTTWAMPTVIFVTVWKGFGYTLTILSAAALGVSESLYEAAEIDGATGLQKFFYVTIPGIRDTIGFCVVTTLIMALQVFDQIYVMTGGGPQYATETLVGYIYNRGFQTAPYDLGYASAIAVYLFCMIAIITVILRKYAFPQGGDETMKKRAMAGLLAMTMAATMFAGCGSTAADSQTADAQGSAGTATEEAKTEKDGGSDAGEGITLTVWAPFTGSDGDVLREIIDNYNETNTDNITVQIDIMDNDTLQTKFATAVSTGTGPSFVLVGIEYLHQYEENGLIEDISDFWDTMGIDKSNFYENVLAKSYIDDALYGVPMQYNVQYLYYNKDLFTEAGLDPENPPTTLDELREAAIACTDPSKNQYGLGLPTDYGYYCEYLWANGGDVINEDATQNLLNSEENIATLEWIQKLATEDGVSPEGLTAADADTMFQSGQLAMYTSGPWNINGLTQLGLNYGITAIPGGSDGAYSPEGGCSYMLTKGADEQTKEAVYKFMAYWLSDDVLKEWSNRNGFPVWSYSVLENADIQNNEILSAVSKASEIGRDWHLGLECGSMIDNDVMKPMMEKILSGADVTQSVQEASDALDAVISDMNKYARTQTEKNLKAAFAGESQARNSYTFFAEIAKKEGYEQIAAIFEKTADNERAHAQMWGEELGLIGDTGKNLDAAAHGENYEWTDMYEDFAKTAEQEGFAALAARFRMVGAIEKMHEERYRELLRDVQAQAVFEKSSVKVWECRNCGHIVVGTSAPKVCPACHYPQGYYEVREDVRGAMPDPKKQKKRVWEIDFHESDPSRRKISLHNAKKYALAGLREKKSRVRPAHCYAGREDPRNIMKREMYGQPAQNAPAVFSACQVQFFSSLSDAIFFQFDRMNFLEIEKVIGREILDSRGNPTVEAEVTLADGTVGRGMAPSGASTGEFEALELRDGDKARYLGKGVTKAVENINTVINDTICGMDASDIYALDAAMIAADGTKDKSKLGANAILAVSIAAARAAAIALDIPLYRFLGGISGNRLPVPMMNILNGGAHAANTVDVQEFMIMPVGAGSFKEALRWCAEVFHALAALLKSKGLATSVGDEGGFAPDLASDEEAIEYILQAVKNAGYEPGKDFMIAMDAASSEWKGTKKGEYILPKAGTKFTSEELIEHWKKLVEKYPIISIEDALDEEDWEGWQKLTKELGDKVQLVGDDLFVTNTERLKKGIDSGCGNAILIKLNQIGSVSETLEAIKMAHKAGYTAISSHRSGETEDTTIADLAVALNTCQIKTGAPSRTERVAKYNQLLRIEEELGDAAVYPGMAAFNVKRMPYTGKGRGTMETYRNEEQMQCLAKSEGCSTLPVSLYLADRVSITGAQAALAVMLSMSLVGSLAKLEVFSENTRQMKMTTEMEKIVVKVDGMQCGMCEAHVNEAVRAAFPVKKVTSSHAKGETVILTEQDIDDAKLKEVIDKTGYEMGAVTREPYEKKGLFSAFRHEKMKVYEFGEQGKPVLMLLPGTGCYWRSNFGKVIEPLAETFRVACVSYDGFNETEQTQFPTMIEETAKIEEYIKEHYGGKICAAYGCSLGGSFVGLMAARGVIHMDYGILGGSDLDQSAKLPAKLMTALMLPMIYPFLTTGRFRFPFLNRKLEKWRKAGDGYVDAFIGMMRGAGVDLSFITKESLRNQFYSDLITPLPDAIDPAGTEIHILYALKMGEKYRARYHRHFAHPVLHELDMQHEELLAVHPKEWVELIEDICRQKMSWSVFYGILIPFLGTSFGAACVFFMKKEMGDRLQRMLTGFAAGVMVAASIWSLLIPAMEQVVDMGKLAFVPAVAGFWLGILFLLLLDHIIPHLHRNSQRAEGPKSQLKRTTMLVLAVTLHNIPEGMAVGVVYAGYLAGSTQISAAAAMALSLGIAIQNFPEGAIISMPLRAEGTGKPKAFLGGVLSGIVEPIGAILTILAAGLIVPALPYLLSFAAGAMLYVVVEELIPEMSQGEHSDVGTIFFAVGFSVMMMLDVALGMSRETWEILQQMEPKDVELQLALQCAPLIAGLKPSNLFNIPCEGVCQVRELIRDTGISMYVLFSTGRKAAVLLYRRESLKKYMEQEPVVGMLHKLGYQDTSLEAVLPVFRMRYRRYMQERRDFPHEMGLLLGYPVEDVRGFIEHQGRDYLCTGYWKVYENREQKQQLFQRFEYAKENLVLLLSYGVGMADIMDIFGGTRQKTLYRECAGMQLKYVDTKEEIIAINRKSKHIEPHLHNALEIVCVTSGSLELGVGQELYHMEKGDIGFVFPDVIHHYQVLTPGVNKATYLIASPFTIAKFADIMQSMAPEYPIIKAEKVEPEVYRVINAILETEQSDITVAQAYFQIVLARCIGKLNLVEKSSVGSNDLIYQTVSYISANFKKKFSLEEMAKDLGVSKYVLSRLFSKTFHRNFNQYLNDARLNYACHRLENTSDSITNICLDSGFESQRTFNRVFKERYKISPSDYRSTCVKEMLSMLDETVLFSIYKVIELYFENKKGPLHFCEMALRKYSVFTKMAKGSVRKKGKKWYYRFYVEDASGNLVQKEFAGTESKSETEKMLRKAMEDYDAKKFLAKADNLTLGQMLDVWAEEDLKTGSLSNGTVGNYLQAVNRIKQHPIGNRKLKTVTSEHLQKFMDLLAFGGEEGNFKSKGYTIDYIRSFHAVLQQSFRFAVFPKQYITFNPMQYVVMRRKAEEDVDLFSDNDEDAEVINPITPEQYQTLMEYLEERNKPAVLPVQIAYYTGLRLGEVCGLSWSDINFEEQYLTVRRSVRYNGARHKTEIGPTKRKKVRIVDFCDTLADILKKAKKEQRKQVFSYGELYQRNYYREVKEKNRIYYELYHLDGTEDIPLDYNEIDLVCIRPDGAYEAPATVETALRTARKRLSELDDNFHFHTLRHTYTTNLLSNGAAPKDVQELLGHSDVSTTMNVYAHANREGKRNSARLLDKVVGEMLKDKELRKTIGSRAKSRRQELGLNQPYVAEKMGVTASTIQRYEAGTIDNTKKMTLEGLADALHVSVEWLKGETDEYETDITDKRELQIRDVMTSILNKLPYDMEQSESDFSKDLLLLMLREYELFVDSFQFACKNFKGNTDNKMLAQTMGFESNKEYNEIMFLREITHTVNALNDMGDIVRLYSKNPETAKNRLANLLSEKDPDSVMTELKFALSIEEAADYTGIGRNTLRNLVEWEKLPILRVGRKILIRRERLDEFLILNEGKDLRDRHAVKAVKGTMKNEMPRNSFVQMSKLHNVRGRIYYISSDKKQENLYAVYETTDRKFWTELAKCNQAEFKKSGTEGKCIEAREFIIALPESFVDYPPDGLLKYMTDKFKSRYGVDCIAALHHNKRKTNYHIHLIFAERNYLDEPIEKIATRNMFYDEKGNHVRTKKEILDENGTIRKRCKVIKKGEVYERQMFTIKDARFKQEHFLDEVKVFYTDVINGLVKDEKEKLSAFKRGDVYLATKKIGKNNPKADKITLNNKVIQDWNRTVDHALVSGMERKEILKVKQEQISTPIKESIHKYGNHPELLFMIIFRAIELLKELIKLLIQKQEQQKARISDLMERRNEKQEKQPAPSVTQTDNQTIPAVTQPFKAPATTTAEKTVIPPRPRMSELAHDYEMRLEEIMEKLKRQNRAIHTQEVKKDLIDEDLKNCTGLFQGKKRKELQAQSNKYAETIKIMKQGLSHIVQDYKYPTVDAFLQVYKQGKSEYESYVKANKEWNSKYGENSIHRKLAEKQAEVQKREQDRDFNYRSPSDRGARMITKWATSIANKLAELSGEDVSADQLEIYIYGLECFLNTFITIVLLFVWGVLSHTLGYTLIWVITFSLLRHYTGGAHAPTQLTCILGSFFLGCLDKWAIIYLKPTVLGYLILVLMCILFAPISNHKICLTTKQKWIHKLISVIIVSIGFLLFYKIGNTKMNTTLFYSFFCVIILMIVETIKNLMRHFKMKMKITILEDSVIESERLKNGIRKYGQQYDWDIEIDEYESGEEYFSKNSEGTTIQASAFFLDIQMGQMNGIEVAKRLRESGYQGIIVFLTAFREYVFRGYEVRALNYLLKPVKENTLFLCLDEIAKELSNNTYIYRNKQEIVSIPYADILTFSSRLHYVDILTVDGKCYEQMSTLNKIIVHLPSEFIRTHRSYIVNMAHIYRITSGTIELSNHLTTQIARSYSKDVISAFAKYTTRFDTSGDFEMLYIDSIWEYIVNFLELALFIIFIHKKLRIRANYKHQAVLMFLFVSFQFAVLCTLNKMGISSYSTLMSSCVLDIGYAVLFYRDSIIRRIFWGFSYSIICLVAEQISFFIPVTLYKGASLELLLGGTLRKPYTMLYLAMIAVFVLLFHSIGNKDISLSPFQKVAYIFIAISGLAIGHYILRLTLESVDKFGDSSFSARLSLVDLFFIILFLVLMLYIYQLGYSKEENIRLLEEQKIYELERTEFNSLSETTEQLRKMKHDMQIYVDAINVLAKDKKWDELIAYTEQYHNTLATTQSAIATGNIAIDCILTAKLDYAEKHGIKTEYSIMAPENFPLDSVELSSILGNIWNNSIEAGERLIISDPTEHPYIYFYIKPYQNMILIHIENNYDGVIKGSIDGDILSVKQGKEHGLGIRRVKELVEKADGVLQITSDNKIFSVHIMIPDKENNKLLMHFKKSVLKNHLLYSIITLMAIAMLFPITAFAQAYVQTWDLVDSGKHLDYDGNSTYMSYINTGAATWNAYKSGVIRKDSAFVVEDVYVSDVNASNGWAGMNIFMKKSSIYGILSIVLIVGMFFTGCASKNNASQLNTNVSNLPIHQMHASFVYDTDNIREAVGICDYVFVAKVVSCDGTEYRNVITTEDEKGNPKEVGSPYTNYTIQVLENIKGELITDKPIPIVKQGGISEKQDAIYLFENDSLPSENSIYIFLAYAQEDGSLLISGPNSNVMCNDSNMYSINSVSEEKSVTEYDEFITYKDANDNEIIPVDRERYKSIYETDNNMMLKSLKQKIAKVGIGLFCAGCVFLSSAAYSQAASYTAYALKLNKTNNFTSMHAKTTSDDYITNEVTAITNTSYANFWAVNNSKSKISNKYKQGVGTGSCNLIFTKSGYNSTNTQVGMGMENYQSQLSTAFVSGNVDFRMILNIASYILCVKNDIGKSYQFIRSANENFVLQGTEAAYIPYIMYLLLPVYATIIASLSLIREEKSNSSILLIQRIGKKKYLAGKLFGILIVTFLTITIPMLINLLLCHLTYPIHGYDSAWGEPDYAIGLVSYNADNFLDMVRLQHPTLYNLIYIFNYGIFGSGLAILAYALSYYNKMKVLYFAKIPGALFIFYIVFNLIVSVFGLNEFSIQGYIMPNVHGNIIGEIVLILLIFGLSIGIIQRKIKNYEVIMKLYKKKILNVNVGKCLLVSLITFVIRYFYANVYLGFHNSLVTITEGVRSQIYFGGILIDHSFDLISLSFFAILFILEICYLTMDLFNDANDNMVILLPRYGKKHIIYKDILIKMILRDCIVVVSDYLFFLFVEHTSNGLEDFKVIFMLLIEIFHLQMISYLFSFWKDSIIGYIVAFIVFFIPVMVCGFYFSMGNVIWKIWHYSLLHIPLFNWHNKLIIYYVEENYEWTTSNIDLLNFKSSCLISVISSAVLVWIGKFLCEKKQILMNLYVKSISKSIKGEKVLDDISYTFESGKIYGIYGKNGSGKTMLLRAIAGFINTDKGYIKYNHKALHKDMDVLPDLGAVIENISFWSMYSGFENLKMLSNIKGIVSDEEIYEIMIYFGLDPKSKKKVNKYSLGMRQKLALCQALMEHPKILLLDEPTNALDQHSIDLFRERILEEKKNDTITILTSHNKEDIEILADEKICMEFGKIKELMMKKFVLTICVVIICMVTALFYGKTGIKTTTGVHDPDIALSENTAMEIFYTGGQKTSYFNNESNYSLDDMEKDSSLIARITVTNSREMSLRSTKTMVKIEEIYKDNSANLSVGDCIYIIEPVSFVRGEEFYTNGWQYLKTEDTYLIFLKNLGCIDGYKYTKEEENSFMPVSEIYSKRNLTHDESCVVFDSAETLYSSISMFAFLTSEKTIVDNYEKIWKNITNSGKYEMNKKKLAKSVVGIALIVSVAILIVVCVGKIKHIQNKKNIIGTWKNANAEEVFTFQENGGLVVNKDMPELGITCGNALYSISSSNMIFVEQRDNSVNFEIEVDQNELTIFFMGHKYWELTKMNIVHAEYNKYHNIIDINYYNGYILRIDCGKAEDGLITTPNSQRMLDALAIDNPLEYARLYLDSEMQDWVNAMNMEWYSTMYSCTSLGVKIGGGIGTAVVGWMLEFSGYVGTNATQPQSALDMMQFMYLWLPLIFDVLIMFVLSKMNVEDANKKLKAEKGIAADEVTDALDINMEEKKYLKWYNKIGYGSGDIAGNVVYAFLTSFMMVYLTDSVGLAAGVVGTLIAVSKLFDGFTDIFFGSMIDKTHSKMGKAKPWMLYGYIGCAITLVGCFAVPVSLGTTAKYAWFFISYTLLNGVFYTANNIAYSALTSLITKNSKERVQMGSYRFIFAFSTSLLIQAITVGFVDKCGGDAAAWRTVAIIYAIIGLVVNTISALSVKELPEEELNEGEVKNDNEKYGMVQAFKLLVKNKYYMMICGTYILQQLYGAMIGAGIYYMTWVLKNKNLFGQFAWAVNIPLIIALIFTPTLVGKWKGMYKLNLRGYVLAVIGRALVVVAGYMGSVPLMMAFTALAALGQGPWQGDMNAVIASCSDTLILRRERELTERCTLVLLLVMIVPRYYENLSVLHENTMPARAYYIPASRRMDNLVEHREESDRMQLLNGTWKFQYFNSIYDIQDSFFEKNYDTGNFDEIQVPSVWQMAGYDTHQYTNIRYPFPFDPPYVPQDIPCGAYVHTFEYSRDEKAPKSFLNFEGVDSCFYVWINGSYIGYSQVSHMTSEFDVTDVLQDGTNTVAVLVMKWCDGSYLEDQDKFRMSGIFRDVYILKRPKQAISDYHIKTRIEDMLAKVEIEMKFYSPTNVKISIEDKNGAVVALGSIDEEGTAVLEIASPELWNTENPYLYKLILETENEVIVDHIALRKIEIKDQVIYLNGQKIKFRGVNRHDSDPVTGFTISLEQITTDLTLMKQHNFNAIRSSHYPNAPFFYEMCDKYGFMVIDEADIEAHGPFMIYRKEDTDYNRFKRWNEKIADDPVWEEAIVDRVKLMVERDKNRFCIVMWSMGNESAYGCNFEKALEWTKNYDPDRITQYESARYRNYDETYDYSNLDVYSRMYPALSEIQEYLDKDGSKPFLLVEYCHSMGNGPGDFEDYFQMIQNNDKMCGGFVWEWCDHAIAHGTAENGKTIYAYGGDHGEEIHDGNFCMDGLVYPDRTVHTGLLEYKNVYRPVRVVSYDKESGELVLHNYMDFDDLKDYVKISYELTQDGLVISKGILPEFSVAPHGEGKTNLKINVPENGKCYLKLIYHLKKELPLLDEDHILGFDEIEVSKEDTKCKLAEKWIPKTVVDSELQVNENDTQIHIKGREFAYTIDKRTALFTEMKFAGREYLNHPMELNIWRAPTDNDMYIKSEWKKAHYDKAYTRAYTTEVVQGKHGVKITSHASVVAETVQKILDVTITWKIEAAGKIDADIEATKDGEFPDLPRFGVRMFLDKKLSAVRYFGMGPQESYCDKHQAASHGLYRADVGDLHEDYIRPQENGSHYDCEYVELNNSRYGIVASAEKAFSFNASYYTQEELEKKTHNYELIESDSVVFCVDYALNGIGSNSCGPVVLEQYRFDDVLFRFQFTLIPYVKGMNTGYLNHSHMDFKDKSRPLIVGSCGTYRLSRHPKLPTYRPRGRLDYQIIYITAGCGHFHFDNVNNETIVPAGNIVLYRPKELQKYEYYGEDKTEVYWIHFTGSNVKNILRQYGFPDKERVFQVGTSNEYEQIFKRIIIELQRCQDNYEEMLVLLLRHLLISFHRELTREHILKNEYLDYEMDNAVTFFSENYNQNINIDDYAASRGMSVSWFIRNFKKYTGSTPMQFIVGIRINNAQMLLETTTYSINEISKIVGYDNQLYFSRLFHKLKGYSPREYRKLRNKFMNYKRITDLPGVRIAREAMVVGDVTIGEDSCVLFYSTVRGDEGTITIGRETNIQESCTIHASIEGDVVIGDNVTIGHQAVVHGCTVGDRTLIGMAATILDGAEIGCDCIVGAGSLVTKHTRVPDGSLVLGSPARVVRQLTEAEKKDIYRNSREYVKVAREMQEQGLLPMGELYIERKEVSQILRKKVFFVEEGDYGKCYSLIGPNGIGKTTLIRHLSDELERAAKPHTYYFNTVLEAGTSFWQFWTVLILKFSDTIGEEELRDAPVPNDRLVEKILKSYQFFEENIGHQDDVVFKMNATRELSSLFEYYTKLGIRMILTIDEFDRAQAIFKDGQFFQRLFGLTPKGANRLNLSIITISRRSVSTIAHHMQEGSNFQDAFPALALKGFSNEELEEYFNFYRDMPCGLLEEKERQQILCLCGRSPGLLMQMRDEIENLDGSPVDIGWIFRERGAFIKTAYERMCTLMRTEYVNQSKTRSSMGIFIEKFIGPAYSEKLNEWVEKLYDYGFVTRVEKSEKNVFELAGLTDYRDKGELVYEPISPYFVDFVKDFAVLDELDSLAAMLEQTERSIRDVLMRALSKEYSEEWETVLGQDVQRKDDYLENLRRIATENEADQRNIIISKLNVLAFNDYFQIIHKHWDIMKKYFSLYSSLDELKQDMYSLNNCRNTSAHLNLEILNESGRHDLRKICEFILENFKCAGGQQTAETSGTAAEASAEKPSQPAGGTGAWHESMIGQTVTLTQTEATTTGVLRGVIAGTSHGASLSKKYLLGRGTPARMLAGKDLRIRLTRWDENAQKFNAELGMGEDITVREIGIYLLNRVEVTLKDDSRAEGILQNIAAEAITVEGREIMLSDVADIRLAGELTDYDVMRDTGMIGNFTFAPEACRDAAELELMRYGDFACTVSCHLKLASGKICADDIRLVSHTHKICAEKLSRTAAIYRFFDGTFLVGRLQQDGTGMLEQSGGGQVPVDFAGVKEIFPLPETNDSLHVTMKDGSCREGVVSAVTDTMFVLIGEGVSMIPFADMQEIRYCGKVVRVREPGSRGKTDTWKIAVGSRDAEDGFWCRVPEHSGAAQIDVGDQVSFVPGITDCEWIAKDVRLVNAAGKEEPAEAGYTGRGIILFFPNALRTNGFIGNCYVSQNYAKMENAGLPRGNVMFSQEQIDFGFKPGNIYVVSYTCAKEPGEVVQEAVSVTLEKMYPYADYAKVWIDGNGEVKMLPVSVFYAKKFVGQDVEVLLSNGERTVGKLKEYTDEKLTLLAGDDGAEETVLQTEDIAQVRYFGPITAYRTDNGTGYISGEYWFHVNNLTDAGEASQLVLGRRVSFTLEQTLKGKLCAAKDVALVSEKTVIAEEKQEESKPERLRGYIVKYMIKQPVSAGFGFIVPEEELEAHLEDKEGTVYFKQTDIDCETMPKLNTKSYYYEVLYTPYTLHGKTCAKDVKIGAGHPYPEKKSTAPAAVTAVTKKIVSKTLPLAEYLEAEEARYAGASPKLGIISLYNGHYALISDCYINKKLVTDQEYAPDGAIAIFNPELAQIETEETIKTAKHCYLVKYVPGGTMVNEKTGMEHPSVDYNYPVLVLASFAKNQYICLKIEADALQVRKVEQVMSTLGTAVPEQVDFDIPELCSGESVIFEMMDSTAAYHVIDSVGDDFYRVKDGKQILKNEIQKIYRFGVVTDFNMEEGIAVINRVMNFSLTLADPNVINILKSQMNVTRLHVIFACEDNRITEVHRISEAYSGLIRWQEGTVTQCDELHRAIVVDQKARHYMSVLSDGMINRAFKSHTLTGQRVFVKCVHHVFAEEGQTVLSLAESVIEIRCQRETATIQYDAGRDIYLGYRNATKYYPVYGASQILAGYVNKETAIVFAPGADGLELEARLVEAGGAQAQPEAQTEEFEADEASVTLENAIGENLAKFCMEQVDLSQLLLKGVTLNEQSMPENSENAQRAVDILHGQPGELQSFAAAKIALAYPEVELEHGAEAGGKYDRENQIGRLLIGTLQKNCRKIGLDANMVFGEQTYYLSVLLRYPLRKSNKKNAAQFSMGDCLYQLFLQDFGTREQLANYLQQGKTADRGQLETLLNQNCRQMSELISHMMLLDQKSMETVCAILKKNTTLTNELLRYAVQIDDMIRTTSLAEALQALRERYKKDRSRFSANLTGILSGSNISADVRELILNMQVRFLKLAGKDDRARFEKLQRACMSVCDYTNQPGFSLQERLLRDAYREIRELEEEIKKHPSREAVEILWMCTDGADGANIFAKLKKEIAQLLNSMYQDEKTRPKIWCKPNQELIENGQKTFWLIVGNGAANMNLQLADNVGIILESYTEGVDVPSKIVLEQKHLAAGDQIPVEVAISVEEGYTGSLNIGWSVEYEYTTAFLTGENDRNGSLQKKTVREDAGNYLGLQYGTGRMEGKDTGAENPYLEPSQGQPLEDNKMFFGREEESREIRSSILRTVDGEEQFIPGSAVIIHGQKKSGKTSLVYQIKNYIKDNEKLRQKAIMLNFNNILDETGGVELLPYFKRSFYANILSRFENEIYDHHPDVVELLRQNQLEIPDLFDPAGNETWAALFERFFREFFRYDGGEHVILLFMDEFTLLCTTIMSEIRRDKEKNESLAAIPNFIKTFSQYGFIQVIIGHEAMMRAFDSLGVLNHTAEFAKSVEIAALDEEASVRLVKEPMERAFGYDVYDTELGKRAVEKLLDLSGCNPTYLMRLCSQMFAYFVSDRCPRSRILVSDVEEMVRQFIRELLLTDFDILLVEDGDSVEDPESRKTYQYLKSAAFATVKSFDQRTSDMKEINRKLTEEQGYSTEEIERTKNLLEARRVISITSGGRVKINTGLFVEFMLQKNGGREMIKIFQKTGLTAYFIGCRPEVSEYRAAGINTTMVQKVAMPQATALGAKMCRGIFFIAEDVCEKAWRRLARVYRGKIAAMFAKINFHDEFYQKLKLLVLPITMQQFMLALVSATDAIMLGAVSQTSLSAVSLAGQIQFVLNLFISGISAGSGIMAAQYWGKKDAASIEEVMPIALRTNLIFSGAFTVFAAVAPEVLMRIFTSDPALIESGAVYLRAVSLSYLLCGISQIYLILLKNTGYATVSSRISCTAVVVNIICNAILIYGLLGLPALGIQGAAYATVAARLVELIWSYLETKQSGRVQIIWKKMFRAADAVLTKDFWRYTTPVLGAALVWGIAYVSYSVIMGHMGSDAVAANSITTIAKNMLSCLIRGVSGGAGVLIGNLLGAGELDKAKVYGGRLTRMAIVVGMTTGGLLMLISPLIVRFAPLSETAAEYLQYMLIFCGCNIMAQSVNTTVLDGIFCAGGDSKFDMKGNLGAMWCFSVPFGFFAAFVLKWPVMVVYCIVNLDEIVKIPAVYLHYKKYIWVRNITVQEEAMQMEELRKQWITSEKEYREGEVFVYRQKFTASQVKKAMFYGTALGVYEAELNGTKIGSQMFAPGFSYYPRRVLYQTHEVTELLREGENTLTVYLGQGWYCGRFLCENQTQIYGEQPAVAWILELEDAAGSRRIVSDETVEELESPYEYAGEYDGEIYFADGRENVTGHASAYTKEAPFALEPTLTEVRLQDEMPVREATVHGDVTILDFGQNFAGIVEIDPSFLKNETITIRHGEILNADGSLYTANLRKAKATIVYHAGAEKKKYRPRFTYMGFRYMELSGAAYQPGMIRAYALHTEMKRTGYFSCENPLVQKLYENQVWGQKSNYVEVPTDCPQRDERMGYTGDGQVFALTGAYNFNTDAFWKNFLRDLELGQLDNTEGYVCATVPQTGPAGIGFISMLGWGNAVTILPEMMYRQFGDEEALPRQYESMKLFVEAEIRKMGKKNLWIGPSLGDWLAMGKGIAWQAMHNNPVSNAFIVHDLKVISETAERLGKREDAARYRRQLAATTNAYIKKFVSKNGIVAKDYQSAYIMALKYVLPEGELRERVRKNFVANIRKNGLQTGFFATEHLLPLLVEAGEQKLAYDVLLQENCPGWMYQVKCGATTTWERWDALKPDGTVNEEKMAGSGENMVSFNHYAFGSVGEFYYQYILGIRPEKPGFAKLHFAPYPDERLGGVSGSYLSVAGKIESAWRYEPDGCHIRLATPVEAVVLLPDGRSENVPAGTYEWTVKRPMKKAVQQIMLGTVTKNEKQTAETLRRIKAAGYDGIELNGFMVKPTSFLVRMLTKAAGMPVGKGGSYDWNALVKEAGLCVTSIHEDLGTIRREPETVAKEAEAFGTKYVVITGMYRFDYADKAAVQGLCRDLNTSGKILKEAGIELLYHNHNCEFLHVEQQKTAYDLLLSETDPEYVNFELDSYWPTEAGVDALALMKKLDTRMKLYHINDRGTRLLKPAMTPILKSDSMELGCGNMNLDALIAQAKNVNVDAVILESHKNWVDNSPLRSLEISAQFLNARIMRNTILLEKGWTFYKNPQSETGEAVTLPHTWNAVDGQDGGNDYYRGTCKYVRHFAKPELEKGGRAYLEFDGAAMTADVVVNGTKLFHHEGGFSTFRVDVTEQLTEDNLLEVYVDNSDNTKVYPQKADFTFYGGLYRMVKLVTVPKVHFAMDYAGGNGMKVTPEVTILDAAEKQADADVTVELWMTGEAPEVTVAVAGETQTVPVENGYAKAVFALKNVHLWDGVEDPYLYTVKAELPGGDVVERTFGCRSFKVDPREGFFLNGRSYPLRGVSRHQDRAGAGNALTYEMHREDMAIVRELGANTIRLAHYQHAQEFYDLCDENGIIVWAEIPYITMHMTDGTENTLSQMKELIVQNYHHPSIVCWGLSNEITAASAVNEELLENHRRLNDLCHELDKTRPTVMADVFMLETDSPMLEIPDMNSYNLYFGWYIGELEQNDSFFDEYHSTYPDRVIGLSEYGADANPAYHSANPERGDYTEEYQCIYHEHMAKMIEERPYLWATHVWNLFDFAADGRDEGGKHGENQKGLVTMDRRIKKDAFYVYKAYWSKAPFVHLCGSRYTDRAEDVTEIKVYSNQKKVSLFVDGAEKETKEGARIFRFRVPITGTHTIRAVSGDCTDEITVRKVDTPNPDYIFNKQGDVVNWFDKEDFKADHYSISDTLGELAKNEMANAIVQSLMAQASASRGDVAESVKDNPALQRMMQRMTLASLLKQAGDAVSEAQMKALNDALQKIPKNMFGKKKEQPVETNGIVYRRAKTWRVALAGCSSGIGMCFYVLLGLASYVANEGYGIATAVVGIILTATRILDGVTDPIIAIIIDKMNTRFGKIRILMVAGWLIESLAVLIMYCWASGKGHGIVLFVLLYCLYVIGYTMCNVTAQIVPAMLTNDPKQRPMVGVWSTAYNYLVPMILNIVITVMLLPKYGNVYTVEMLAASCIVCVAVSGVGLLLCCIAVSDIDKPENFVGVTSKKKAEPVKVKDMWELVKSNRALQTFIVAASSDKIASQTASQAVVTTMLFGIIIGNMQLGTILSVIGMLPSIIFAFIGAKYAGKHGNKEAMVTWTYVCITVAAVLVVLFIFIDPTLIATTLPMMIVYVLLTLVLNGAKMCVTMSSNAMMADIIDYELDRSGKFIPAAVTGTYSFVDKLVSSFSAAIATGLVALIGYRHTMPQPTDPSTPAIFWMTMSMYFGLPLIGWVCTLCAMRETPLSKEKMEEVQKSIQEKKQAEVEKVIEEMKMRLPEHFLIGAATAAHQVEGNNIHSDLWAMEHMKHTSFLEPSLDAVDHYHRYEEDIKLLSDAGLNAYRFSIEWARIEPEEGVFDAAAVAHYRDVIACCRKYGVEPFVTLHHFSSPKWLMTKGGWEAETTPADFARYVHYIMEELGSGLHYVCTINEANMGIQVAAIAERYKRQMMAQMQTAQTTSKGGDSADGTVQVGINLQKMLEGQKATAIENLEVFGVEKVENFTSMRTREGDLLIMKAHALARKEIKALYPDIQVGLTLSLHDIQPQAGGETRAASEWDEEFLHYLPYIKEDDFLGVQNYTRSLIGPDGQLPNPEGAQLTQMNYEFYPEALEHVLRRVAEDFHGDLYVTENGIATSDDTRRVAFIDAALNGVAACIRDGLPVKSYFHWSLLDNFEWQKGYSMTFGLIAVDRSTQTRYPKKSLQFLGHWNQMDIKERLSFFQEMVQCEYPLHLWHYSPEFELIETDCPAELMLPDIISMLGFSSLVLAHIESGNRMPLILDTEFGLLWIAGFEYQGFALQQIHIIGPAFTGSNSHLVLRKKLDSYQLTVKLRSKIVKQIESVPIIPSSVLLSYAIMFHCAITGERITADLISFTSHSTTGVPDDSPLLSGEHPGIWMAEQTFLSMIREGNPEYKKALAKSMTLSSGVKAEIGDSLRMSKNNLLVLLTLCSRAAIDGGLNPSIAYTLNDYYAGRIEECKTTAATNNLSREFLDDYVQRVRAAKETNAHSRQIQNICDYISLHIREPLSISLLSERLGYTEYYFSHKFKEVTGLSVNAYIRRKKIEEAKLLLSGTRMSIQDISDELSFGSRSFFFSSFQKETGMSPTGYRREHCKGMDVMVLIDSFKGSMTSMEAGNAARDGVLRVYPHANVTVRPLADGGEGTTDALIEGLGGRKVELSVTGPMGSRVKAYYGILADEKTAVMEMAQAAGITLVEEAQRNPGKATTYGVGEMIRDAVSRGCRKFIIGIGGSATNDGGTGMLRALGVKFLTKDGKEAGEGADALGKIHFVSLEHLMPELKECDFQIACDVTNPLCGEKGATCIYGKQKGIREEEMPRIDADMKHYAAITAERIGVDYADREGAGAAGGMGYAFISYLGARLVPGIELILDVIHFEEEAKKAQIVLTGEGRLDLQTAMGKAPVGVARAAKKYGCKVIAFAGSVTKEAAACNDNGIDAFFPIVRGVCTLEEAMQREKAMENLTDSVEQVFRLLMEFLQGVNWNSEHDKKRKVDIKVTCIENGVTQVRLVEKILLMKKKRDEITIRSSAAEYLTYVASVGDQQDSIEMRYEDENIWLTQKMMATLYDVDVRTINEHIKKIYSDSELEEDATIRNFRIVQTEGSRQVTRDTKHYNLQMIIAVGFKVNNERAVQFRKWANGIVKDYTIKGWVMDDERLKNGGSVLTTEYFDRLLEQIREIRLSERRFYQKITDIYATALDYDRTAKTTKQFFAKVQNKMHYAVHGHTAAELIYERADADKPHMGLTTWVAAPEGKIVKSDVSVAKNYLSEQEMRSLERIVSAYLDLAEDRAERHIPMTMEDWAKRLDLFLMADDREVLQDAGKITAEIAKAKAETEFEKYRVIQDRLFMSDFDKYMLELEENAKKMIPIQNIYYMLSYAFQVLNEQGYKNIATEQFHNTAELMAAILEKGIAIQLKRGLGKEYIPQTEALSSLRGKIDIAESIKTQSMLRKQLICTYDEFSVNSIMNQIIKSTVELLLRSNISKQRKKNLRKLMVYFSEVDFIDSYTVNWNVQYNRNNQTYRMLISICYLVVKGLLQTQSNGHTKLMDFLDEQRMCRLYEKFILEYYRKEFKNQITANASQIPWQLDNEENSMLSVMQSDIMLQSGEKVLIIDAKYYEHSTQVQFDKHTLHSGNLYQIFTYVKNKEYELREKGHTVSGMLLYAKTDEEIYPNNVYQMSGNQIDVRTLDLNLPFDEIASQLNTIAKTHFDLMLVTPPFGASSNIALWRAYSKPPVELVVADLERFPSMNLWAKGSVLVTATSAIYNLIQLTIVGFMVLWNMSMQSKWDKAFWARGYYVETIGNITDEAVQKYIKEQAEESRKEDSRSTALMGRVKRSNALSRIFMRYVLVMLGSLVGLVIVAYLLLCLLISVGCIYPANYAEQKINEAYDTILRADKVTAEMIPALCDYVIFSENGEKIGGDLSEQYEQIAWNVAKYGNASGKYFYKVIVRENEYVVLQYRLTPQYHSAFLREHFIGPQNVMSIMSVIGAVAIIIIPSIRFGKRIKKQMQPVLDAIDQIKNQNLEYETSGSGIKEFDDCLSAINDMRDALRESLEKQWITEQEKNRQMSALAHDIKTPLTIVRGNAELLSETELTTEQKNNITYVLNGTTQIQSYVKQLIDVTKSWNCSDVTYTTVMLEDFFADIKEQALGLAEIYHQKIDWKAGQSDKKITIAYDPMFRAVMNVIQNAVEHTKENEIIYIDAKEQDGRLTFIVEDSGSGFTKEALLHGTEQFFMDDTSRNGEAHYGIGLFFAKTVAEKYGGGIKLSNSENTGGARVEIFFLSSQETSMAKILAVDDEPAILEMIESILNKDGHLVTKVSNPLKINMEELHRYDLILLDIMMPGIDGFELCKRIRILVDCPILFLTAKTEENSLVNGLSLGADDYISKPFGVMELRARINAHLRREHREHSVRMVLGRVCIQISQKKLLVDDKELPLTKAEYEICEFLAKNRGQVFSKEQILEAVFGFDNESNDSTIITHIKNIRAKFADYDYMPIKTVWGIGYKWEEMIGRSLNADLRKMKGTSVILAHLLIPIITSVIFLIYYFFSPWNENMKVIAFYQAIGAGLPVLIGIFTASVMEQEQNAGNFQNLLSLPDKLTAFLSKLLMLLVLCLCSILLTAIIFGIGFGRIASSDIEIMKGCIFAALLLWGSSVPLYLWQLILAFQFGKGVSIGAGIISGLISALMLTGLGDYVWKYVFVCWTGRVPYTYLQSVLGETSVGEWLSFIPGCLIFTGISMVYYFWWVNHWEGNRISEMVNIIKAEHQKAKRTMRKKFIWGFPLLTFVMAFIFTLGMTNAYAESVWNWWYTLLLPGMIALFCYLSVAQEKKIKYYHLMTIPTDRRKLLLGKIIYIGYMILFSNVIVFAGATLGGFLLTTRVPVGGALIAVLFLTVSELWEIPVALFLSERFGMLVNLFVCLFITVSGVVISQTRIWYVLVSAIPMRMMCPLLHVLPNGLAAEAGNPLLDTGVIVPGMCLSIIWFVFVTVLFLKWFERREVKMEMMLQTQNLCKYFRKQKAVNNVSLNIEKEQIYGLLGPNGAGKSTTLKMLTGMMKPTAGKIYFDGKLLDRKDLSKIGALIENPPIYENLSARENLKVRQLLLGTDENRIDEVLQIVSLTNTGKKKAGQFSLGMKQRLGIAMALLGEPELLILDEPTNGLDPIGIEELRELIRSFPEQGITVILSSHILSEVQLLADKVGIISGGILGYEGGLKQGDNLEDLFMNVVRKNQKAGEIHGMYGEALYKPEMKEGNPIRLYSLDEITEIFCKLGLRICNSFADFSGKPSSDNDIQLMVYSIREMDESKKKDRYEDAKKFVRYSDGAKMYSMGMTKFQEVAKDAKACYKIGQLVLVNTEILDKYLETFHITDSEFYKMAKARKDNKGRALRKGESQRTDNTYVYTYTDPFKKRRFVYARDLQTLREKEADLIKNQLDGLDVYVAGSATLNYVFDRYMSTKYDLRRTTRSNYLYMYDHFVREGFGQRKIGEIKYSDVMYFYYYLLNEKDLQANTVDTIHTVLHPTFQLAVRDGIIRMNPSDGVMAEIKRKAGKNKGIRHALTVEQQRAFMNYTANNPVFYHWHPLFTVLLGTGCRIGEVIGLRWDDLDFEKRLISINHSVTYYAREGNKTRKSEFAVSLPKTEAGIRTVPMMDAVYEAFKEEYEVQKENGFNSTVIDGMTGFIFCNRFGNIHNPQTVNRTIKRILENYNAEEVINAKKERRQPVIIPNFSCHHLRHTFCTRFCEKETNVKVIQAVMGHANIETTMDIYAEVTDAKKKEAIENLSHNLDIFMAKMGRPKSDAPKLNTLSLRVTDSELRELKDYADSHGMTITQLLHTGVDLLLKTPDAEVQNLFPMSCHLYGFFEKIICLLMRAGKSLRLSWADNKLHILCRKEVMIVERMKNGKRFVRYKEGAEMYSMCQSKFEQMAKDAKAIYKVDKLVLVNCDIFEQYLETFRLYVMRYLLSLFCESAYEGILIADIEVKVRSDECLAKCTAVVWGEDTYFMNTMNRRIEIINILIIRRHTTANELAQELGVSIRTIQYDIQALSPQYPIYTKPGENGGLFIREDYNPHINSLTPMELENLREMYEQTEGVHKKVLLQIIRKYGPDKLKLMILSIKDFSKRRGESQPKKAGEREKNNKPEHTDRQMKFQMAKRERQNELKIYLNNDEQYILEQKFKISGMKSKSSFIRHLILYGYVYDVDYEHLREYNTILARIGNNLNQIAKRMNATGNVYEADVKEVKELMKQVWQSQKSMLSKQPSIKQMPSEVSYKEAHQIGVELADKLLEGKYSYIVSTHIDKGHVHNHIIFCAADNVNHEKYHDCKKSYYHIRHLNDELCSEHQLSVISPSDNRGRKYKEWLADKNSSSWKTKLKNDIDEAIQTADTYEDFLDLIRAKGYEIKGETFGENDLKYISFRPLDRERFARGSVKSLGAEYTRERIKERIEAKALEQSQKRVPFPRKAKPIIKDYSSKKLIDTSEEKFTQSPGLKHWADIQNLKIAAASYSGAGSIAELEKQLAAKSALAKTARNSLVETEHQLKNLGQILKYAEQYKANHIYHVRYQKSKDQDAYLRRHETELLLHDGAENMLKRFGIDLKNLDVEKLRSDYNALYSKKETLQNTYKSAEKEINALNRKLDNLKQYLDRDSQDHQTSDRKAERNQNTLMNYSRIQILYGVEYMIKRRKREKDRYYILKTKSNMTYCTYCGVLQMQDIKQNLADAIRKSRTELGLSQEKLAEILGFDSRTILNIENGRGNPKFEKLYPLVRHLNISADRIFYPESVTPQPNLQKLFIMLNDCTEQEVAELLPAVHYLLALMRKRDNSEQMTEKDIIHKLTYLLHGHRRKIFIIFGCLLISTGLNLCIPFISKEIMDEGFIGGNKNILLYLVVGSFAIYMLISALNIIKEKVRVEIVAKVQYSLWHQAYEHLMRMKINYFDDRNAAEIFNNLSVDIANMVSVADESAFFVVTQAFSMVGGVIGLFILDYRMTILVLLFIPIKAVVMKYFAKYRKKVMDEFILDSEKYSSWFGDTVGGVKEVKLFDILDNKHREFDEKQRVVIRKQKKMNMLSQWNSAADDVLVHLLITLIYIVGSNLVFNMQLSVGSIFAFITYSSYVTGPISAILNIGYLLSGIIPSTKRYYMFMELDEENSNQKITTSPQFGDIELKNISFAYEEGKPILDGVSVIFTKGSKTAIIGRNGSGKTTIINLLTRLYEPENGQILLNGTNIADMSLQAYREMVSIVSQQIYLFNDSIRNNICLYKQVSDAMLKIACRDSGLEDFIKEVSLDYVVGQNGAMLSGGQKQKIALARALIHDKPIIIFDEATSNTDAYSEQQINALLHTGLRDKTVIVITHKKEVLSEVDQIVVLDDGKIDIVGGYEAVKKSKYWLQLRDDYVDIMVILMVNNKVHVCIIDNGVFCGQVHLYKNMEVVGNEIRLVISESDKLSHGSSCAKVIEANIEKSYELSSITILDSYGKGEVGSLLLALEWCKNNAVDIINLSLGSTYFKDRRLLQEIINECAYSGLIIVAALSNSGFATYPAGFTNVIAVRKSDVLKRREYKVNYSAGLGFGIVETYGSDTVLVDGKMHQTRASNSIATPYVTSKIADIYFKGITPFYIRRFFSQEQIDINCFYVDWIRTAYLSHVQLPSRICSFCVSDDLDSSDTVILGEMDNIEHYLDAGKNIIYLGNDKLEMTSDHCYIWSRYNRERQIELNSYTDNEDIEIPVIFVKGCDSLNKVRELCRKMIEQDYNAYGITDKIVGELIGLRYIPVEKKKGTDIKKYICSEIFYGQYDILICDLGNYSKEDIQTEICIEPDVYIYADDAEISVYSEEESKVFKKIKGIPEQYIIELLTREMEDNRTSIKKRLDDIFIEKMGYLVNRLTNDQRSKSLLSDSAGMQARDLLKLYMELENEFHIDFNPLVLDGNFDKYDCLLGYIVRKTGEKNVNMNTNEPCAAVFPVDEDFMRLPNNDVIQLEGRQQKITYYLTLGGWNISSPNHIINVIDKFDFSQLDVLVLVNSYHFLEHRVIEDIIRIAAQNNIEIYWARDDRDVDRQAIEEMSDELKVCTSFICNEVAADISTVLHNFDIPIVSIAGVGPYVQKFQVGLKLRNDFVSAGYKTLYISSRREGVLFGARIFPEFLFENGMSFSEKIYGINHYIEKLCREEQPDVVLISVPGETMELSQKHKLDFGYLASIVFSAIKPDVSILNLYNLKYTDEFLEEQKSYCKYRFGAVPDLFYATYTGIVESSLQEAWIQYYHGDKIYDDLLTKNKLFNEADVMNGLFFERVMEILEEYGSLDFMMKVEAPFIHLIKLHTKYYLYDVNSKMIVNISNDLFDFFKSNENIKAEIEIPHKLEDEVRRLLKYDLFSKTDTGYEIEYPQGTNLEEILNNCMRIMTLQVTQNCNLRCKYCVYSGSYSNRVHSNKRMSFETAKSAIDFLYAHSSMTTSIGIGFYGGEPLLEFDLLKKCVEYAKMKFIGKDLSFTLTTNATLLTEEIMKFFVKNNFFVTISFDGPQVIQDKNRVMADGKSGSFETVMKNVEMFLNKYPDFSWHVSFNAVLDPTNDFSCSNDFFMNFETVKSITANGVLVSTDGLKKELEKDETFSIAYEYEMFKNFLCSCGKLDKIGSKLSVAYIEQLEKLVAKREVGIEKNKKFAHPGGPCLIGVHKFFVNADGNFYPCERVDESANVTKIGNIKSGFDFDRIRELLNIGKLTENECKNCWAFQFCIQCFRSAVDGDKLSKEKRLAKCKSSKMNAEESIKDYIVLKEYHSKFGEGLRGNMKKLGKKAKVHENSLSAYCSSACTCLTITCTCSSTSHDPTGNYFQGDVKADSAGTIVWLMAISSVGSYTNSYENLYTYNQTKKSETSEISEVKTETTKKSNNEEYLKSLQKQVPYMKLQIGYGLNTSNDGKVNVVDVNPKLVEKMQNDPKAAKEYTQRLKDVESALKWLDNYKKSVGSTVIVRHDYIDENGNLSHFSVSIRKDEMNERLRKEAQENAEKQIEKTRENARKKAEQIAEKLEEKAEEAKEDGEKIAISEGIQDENEIVKDRAEKLLSEKLENATDGEVYLDNEDMQVIIDAAQNREAVTTNTSSEVGKNFDFKIMVEELKPMLENISGKKLDELCDDECLFSRKYAMNARDIVYFLVEIEERYGVVFDKEKINNPDFFTLKNISNELLAKRELKNCMAAASRALMYPYDISLLHMIMHKFPDFEIIEVASPNGWGYVGKDAGSKIGIETGIIVKHEQEIEFNQIEKLFLMPSIISLDDKCFRTIIDKAKSLNIEIIDMRNNGNDVCLKRDDKLYGTEIKKIDKPVVLVIGTGDRTNKFDIQLIVRECFQKKGYTVSQIGTKGYCEYLGFHSFPNFMYSNLQVTDRILGFNHYIYELSKSENADVIIIGVPGGLMPYSEKYNNDFGYLNFMVSNAVVPDYVVLATTYVDYNRDYINAIVDSLRYKYEYDVDAVFIGNSSINWDVTESLDTLTYVTLDKNFIDEEVRKCNAYSVYDSDSIKQFSEQLINTLVGYDNYPTLMSVPYIHTFYTPKGYYFYDFNTNAIVRINKSVYDFLNEWEKNKDCPNSQSECGNIIDELKRAGFLSERHWTKIEHPATKMLDRYLHSSVESITLQVTQQCNLKCNYCPYSGSYYNREHSNRHMSFETAKQAIDFYIAHSFDIPVAHIGFYGGEPLIEYDLIRKIVEYCREKCFGKKIMYFMTTNATLLTEEVIDFLMENEFNLSISLDGPRNYHDRNRHRIDDSGSFDIVMQNIERLYKRYPEKKDNVQFNCVLDPTSDIKCINDFFMNEDMLKEYRVLFNSLSREGIKDNDKFVPNKDYLEQFEYELFKMFYSKSEKIEGIDVSKVVESYYLQIKTVYAQRKMSSFVEDFSHPGGPCIPGTHKLFVNVKGDFYPCEKVCECSADTIIGNIDKGFDLDKAETLLNVGKLTEEQCRDCWCAKYCYICTAHLDQGDGLSRELKQKHCAGVRKSIENDFKDYCLLHEMSGLDDDVIYLNMSEINSFSDYASKYNTNMDYSSLFGGGAPYIDNGMGGINVSDYAMIKNGSYGKLMKAYYAKQDADKLSQFGDSSKTLTLMRSSADSLKKSAEVLGDVSLYEKKKFKKKDEETGEEIEVEDYDWDAITKAVKTFVDDYNSVVEQAGNSETKNVLRNAAWMTGITEKAGNLLSKVGITIGKGNKLEFDEEGLKKKTTLGESGIEFDNISTLKSLFTGYGSFASQIEQKASAISSAAARTKGVDQTYNKSGAYSDTLSKLFGSTVDEKVGDKFKDKDTVKDKNKDKEKDKSSDKTSMTINGISGANTQAAQIGMNQAMDSYSKNIQNQIANAQKQLQELSSNEEMTLEEKMKKRQEIQQQISDLNMQLRQHQIEQRKEQQSKGASMDDMLGGNRTAAKSGNKGSGLSQASMQAMISADSSMKQAKVQGSVATQMQGRANVLKAEIKQSGSTEAKEAELADLEQKAVNATASQMNTLAEANKAVSEAAAAERTEKKTSDAKEEKEAQAEGKTEKTADSGAIGEKAQDGISGADAQTGNIENVQQDNGAQAQNIQPAQTAVPETPAAQPAVYTHVDVRLMSPIELCWNITSYISIIVQLIAAGVCFGVFVLPYMQGRDKAVKTGSVYGVVMTVLYIMPPQIDNILAYFIGTVAAFAVMYVEDRQNINQKIFLSVTFFTLRWLSSSMAGIIDFFLDIVLFNSAIAAMSWLHYGLYVMTRIMDILFCSLLLLLSIQTVNRAYEYKNRYMGKKELLMLIVPSLLGMVGYMIFHFYQVKSEMTGFYDVLCFLYYLMSIIAILVIIVFFQNWKSLQEEQLGQELLESQINNIKMHIKEVEKLYGDLRAMRHDMGNHIQMIERLMGADNSSEAFAYLGRLKSEWQELTPEIRTGNPVTDMILLEKSNEAQMRGIRFECDFRYPENTKLDVFDVCIILYNALNNCMESVNGEKPYIKVHAFRKNSIFMLIISNSFKGRLRIDPAEGIPYTAKKNGEHGIGLKNMRRVAKKYMGDLSFEQNGDEVTVGIMLQIVMHMEHTIAKDAFSGLSGNNAVYNAICIAVCDDEQFMCDMIEEKIKEMLPDAVVCKFFSAQELLDSETQIDILFLDIQMPEMDGMEAARLFRRDWKQALIIFVTAAPEYVFQAFDVGAFHYLVKPLSDDKFCEVFENAVQEIESRKKGNGELDEEYMMIQAGGVHTKILLKDIIYAEVFNRKVIIHTVNGDTEYYGNLSNLEKKAGEDFFRTHRSYLIHFRFVHRYDAASVTMEKGTVLIAKQNYPEFVKQYLKYNQRKGREIKMKNEFTVEESNLISIYTEEGTASGLGSRAKVIKSISDAMEHLEDDEMMELSLRVIVKLIDLTDQEFAELEFIVAEMVDNNTNTVINTNTVHMTEKQKVKEITDRLEEGLKELFESEKYKSYLSTMSKFHNYSFNNTLLIAMQKPEATLVAGYKAWQKNFGRHVNKGEKAIRILAPMPYKIKEERDKLDPVTGEMTFDENGMPQKEEVEVTIPAFRVVSVFDVSQTDGKPIPELEAQELLSAVEGYENFVQALMNVAPVPIGFEDIPGDSKGYFHTTENRIAVQENMSESQTLKTMVHETAHSMLHNKEISQDIDAPVKDRNTKEVEAESIAYTVCQHFGIDTSDYSFGYIAGWSSGKDMKELKSSLDTIRRTSSELIKGIEGQLQEIQRDRDLMQDKSINGLEKESRLLIQNSDLSEYSLVNVRGMDAAEIMEALSAMNDDDRLSVAAYLESRGAWTTEIANEETREFGEYHLDVRYITDTNEIIDLKKEMAWEERAKEPIGADDVILKITHAEGFEIERITNKTPEEVQEIMGALTKLEEKDRKNIHDCLESYGADYIPIIVDGGRNSGMPQFNDFEIDLNKKEVVMMNHLSPAQQAEGIINRLEYAKTAFSDDERNLIVNYAYKLNDMEKTRELAEHIYYEETEGNQGAALAVIDAQAEIDALPDPMIGLSEMEDYGYTWNEMLPLTKERALELFEHDLPIYVLHEDGSETTVEDRTQITEHEGIFGIEKKDWENERNFLTMQEELSENEAAKETRLLYGSTDKYGIYQLKDDPELRQFRFEGTEALKRMGITKYNFDAIKRENYNLIYVGELSELQGQTQGETLEAVFEKFNIDHPTDYKGHSLSVSDIVVLHEDGENTAHFVDSFGFTELPEFTRTLEGEKTQEADKAEMELTDEEKQFLETDNAPLIAKKFLAWDEIEDLGYRFFEDGYIDRFEPSEKALYGDGMVPEPEIYDIARRMHGGEDIRKELAKALIGGYERVMGIGEDDAVAVFGNDAVTVTFGNAKKQISYEEMGTAFLGLIEREYKDVEQARATEEQEEEIAEDATFGQSVQKPETESIEDGDEIIDLGEEREQVLAEMKKAQGERQDTSGHDVQKPGMEDKEEPHETELAFQIADRYITIQETEGGYDYSIMGMDYKEIDGGVYDNPDISIREALNDIVEDLKAEPDHNGAKGNIEKDSKLIPMDFDELLVKNMYADRVEGSTITNMQNTQSSVVADFKAKTDELFHEISEMNPAEIEETVKVHVQAKIDEYGIDAQIVDAAVVGSRCRGLEREGSDLDVVVELSTNEREDDLFNTFNEDGLHIGGIKVDINPITEQRTGSLETYLPQVEEYLEGIRMAREQAEKEVEVTLMVSECSEFHNYGEFYENISTVEEAIAIWKQIPPERLNAIPAIGINVHLPGTEPYEDSEIDILSGRRIDLEILEHIPDIKNNPKAMEVIAQLVAKLPEMEIDGVMSEEMEARVWELRMPGLDKAGQLAVELDRFVYDYDIYSYRNDVHSMTENIAELTEMLNQGDTEHITEWLNEAISEGAAPEEEERAKELLEKLAEYTPLAKIEENAINGMEEQNYNMVDDVQGTGDSSFNNGVGEKAQKEAAKREQEQPAARISLKARLAEKKAQVAGQNQDHDAQENSKNNQREMMYGKSINSHAPFLFQEYRLVNLQGGIFACKKSKSSGKEKLWMPITDKFFAINIRKYLALGDDHEAGEPALIQLLSGFSCPKNPDVEHFLKKNAIEFTKKNQSVTYLVFSKDNGEMLGYFTLALKPLTIRGETVSNTTKRKLLRVSELDVKSDTYTMSAYLIAQLGKNYADGRNREIAGKELIELAWMIIEKTQYMFGGMVTFLEAEKEEKLLSFYRDNSFSQFDTRQTASGTTEPHELVQLLRLLMATSSITKNFVISGKEQVEMFVNAIEESAKNRPVRTPVNVKFIETEDELREFMRFREKKAKEKLNANNGMETAKQNTQQNIEENDALKQFMGLLNRQGMGEQSQDFMELFQYVAGMQLQLAVMTDELQGVKEQLSQLRENQPKTVTESLVDKVTHLQEKIANLSERLSAVKDHLAETATQAFNAFKEKGKAEMCKVLQKGISGVKSVLADCREHLVDVMMDYKKTANQIDSIGDELKQIGNSVSNVGRLLAGKGTKEASDEKSGVALTRAVNKPVKKAIARLEENLDSIDRMSEKLDKIYSRLEPQKAAEKGTRTSLKEKLAQMQEKAGTQNRQPDMEKKKEKGKEAVIMEMIIVTKIGDYYAKGENMEKEQILQQLFSQTKEDKDILLEQLVFCKFANEYDFENYFRIGKLKESDLFCLISFLYHQDCFLMMLDIMNRYRDRFVSHDESLLKELDFSEQFMSRIEKIKGVAECMIKFDKLFKTLKENGISQYSLYTHYGISRAQIQRLKTNQSVTTHTLNVILNILGEGFTLNDIAEFTPDEKEEEMTTKYQMISMLAEETAKQIARNGQEWMKYLDTAARLYKYPFNEQMLIYAQRPDASACASLETWNEKMNCWVNRGAKGIALIDTDSERPRLKYVFDVSDVHKARRIGRDPYLWELREEHKDVVLARLENIYGETDAQMPFEKRLIELAERIASDYYEELLPEIGYVREGSFLEELDELNVGIRLRDTLASSIAYTILSRCGADMEQWKEELDFDNISEFNTTKTLSVLGSATTEMCKPLLMEIGNTIRAYDRQTARKRAEEKAALEQSGTILKNAENLDEIPLANTAEADYNALKRESETQIQNETETTDHKETEGIANETDIREERGLSDPEPDAERGAGTGTHEVRADEKEILAGTPERDLSGHGADGRAESTLPSDTGAGRAENGLPDTADGKSRGSGRGTESSRSDEMGGTDEQHQTFSGGNRADGADLQLENSTQQNKEQQEPDSENNSLSGSFLDNDQAVPNEDVTGLRKGILCSDEFLIHKRPEIAGYFAMEQDTRLQTEYFRNCFPFGTYYALDVAGTSVGFHAGEEGLYINMTGKAGAENETLLSWEDARFLVNSYMEDGVYLLPGEVAEQIDMDGMYKQLDLFTMFSEQVGNIAMKQAEEVSKVPPAMPIPQEQLDAILRSGGGRDNSRKRIYAKYCQGKTPEEMAEFLKKEYGTTGKGFEFDGKQTAVWFDEQGMTAGYGTSALENPRFTMSWKELETQIRSQVENGTYMSANEVYLVDEAERGRIANHLYFFFRDGMEEMPEELELKAANYPDSHAGLVELLSTPEGVDMAASYMDKALHQLEMGEKKLRFRSVMPKEELRDELDNLLLKKKTFPADDRVEVKKEDFITQDEIDHRLGRGSGYHHGSFRIYDYFMEGHNSKDAADFLKHEYGIGGSSHALAGADHSWEDHDSKGISLKKGNLSEPYSEVLLSWKVVEKRIRKLIQEDKYLSPKGKEAFAAYKEEQAQKELEKAQEKIERDTKAACKDAIDRAITENFDGYRLPKETAEGVIKEYGIERVSYVLANTVMHRRQEDRISPENKEWAKSITPYAMYESRDIVAASHPAVLNGFINQARRYIEHEKEIAVQAEAEQVQEPEQNDVLDISEGELEWHIIHEGDDENGQPTEWSAKLPDGEFLWIDKEAEGYALYNTHHTDASPVTVSETLDGAKESGEDYALEFAAVDVEEVEKTTVALESSEDYSEPGIGFYTHQYADGRDGVRYRLVTQGEDGLLVPYPEHNRFFINRGLAQEYIDTHADLIDVIGYDEMVFSSMQKQGEYKREQAGKETYGHDVNPSVMRKDLEPETISIDGQKCIKIDEWKSGEDSYLLCNSTEDSDFFYAEVNGNTHFEYDHKPDREEIEDDFIDIEAMRDIDRHEAEVFSRFEGSDDFPDIDTDAVREKLENGEADKEADAMLAFAEQAAKENEVEPYKRFSVTETSDAFAPGENFAIWDDVREEYYHDGDGTVHTFADRKEAEEYLAQVEKEVSEKEAAEWSYVEAAKTPFYENAEPPLTAEDVQNLVLISQDYNRGSRTTVYDFECDIRGEHDKLQYTLQYHDDGEGFTIHTEKNDIWERMPEPELSRLEGILGREALYYQLHNKIAGAESLEELKEIEFDIMENQSPYFSAVSGRVWEDFNRKNDELSGVSHEVPETSGQNVQKSEPDTLGHNVQKQEPKTDRQNAVNFHITDDALGIGSAKEKFRRNVEAIRTLEKIESENRTATPEEQEILSQYVGWGGLADAFDETKANWHNEYQELKGILSDAEYASARESTLNAHYTSPVIIRSIYEALENMGFEKGNVLEPSMGIGNFFGMLPEKMQESRLYGVELDGITGRIAKQLYPKADIKITGFEKTDYPNDFFDIAIGNVPFGQYKVADRQYDKNNFLIHDYFFAKALDKVRPGGVVAFVTSKGTMDKKSPEVRKYLAQRAELLGAVRLPNTAFKENAGTEVTSDILFLKKRDRVMDLEPEWVHLSEDENGIAMNSYFTEHPEMIVGKMEMVSGQYGMESTCTPDTTRPFAEQLREAVSRIDGKIEEMELDEFDREMADQTIPADPDVKNYSYTLVDDKVYYRENSVMKPVDMKDSMLERIKGMVGIRDCTQELINVQLQEYPDTVIKEKQAELNSLYDAFSKKYGLINSQTNKRAFNQDSSYCLLCSLEKLDDEGNFKGKADMFTKRTIKKAEVVTSVDTAAEALAVSLSEKARVDLDYMAELSGKSTDTIKEELTGVIFNNPVTDKWETADEYLSGNVRDKLETAKVYAENHPEYAVNVQALTQVQPKELDASEIEVRIGATWIKPEYLEDFMRDTFETPQHLFDRNIMGVQFSDVTGQWNVKGKNADYGNALVNMTYGTSRRNAYQILEDSLNLKDSRVYDTIEEDGKEKRVLNKKETTLAAQKQDTIREAFKDWVFRDPDRRQDLVAKYNKLFNSTRPREYDGSHLKFPGMTPDIELKPHQKSAVAHVLYGDNTLLAHCVGAGKTFEMTAAAMESKRLGLCQKSLFVVPNHLTEQWASDFLRLYPGANILAATKKDFEPANRKKFCSRIATGDYDAVIIGHSQFEKIPLSQERQAAMIERQIDEIETAIAMAKADNGERYTIKQMEKSRKALQTRLEKLNDTSRKDNVVTFEQLGVDRLFVDESHNYKNLFLYTKMRNVAGIAQTEAQKSSDMFAKCQYLDEITGGKGVTFATGTPISNSMTELYTNMRYLQYGTLQKLGLGHFDSWASSFGETQTAIELAPEGTGYRAKTRFAKFFNLPELISLFKESADIQTPDMLKLPVPEAEYENVVLKPSEYQQDMVASLAERAEAVRDRKVDAAVDNMLKITNDGRKLALDQRLINDMLPDDENSKASTCVRKAFEIWEQTKEQKSTQLIFCDLSTPKGDGTFNVYDDIKNKLIGKGVPPEEIAFIHNANTETRKAELFAKVRSGQVRFLLGSTQKMGAGTNVQDRLIALHHLDVPWRPSDIEQQEGRILRQGNMNPKVKIYRYVTENTFDSYSWQLIENKQKFIGQIMTSKSPVRSCEDVDEAALTYAEVKALATGNPYIKEKMDLDIQVSKLKLMKANHTSQKYRLEDNIAKHYPQQIAILKERISGMQADIQTAKAKLPADKEQFFMKVGDKAYTDKKEAGAALVEMCKEMKTVNVPATVGEYAGFKMAVSFDSFNHKFVMNLKGQLSHNLEIGSDPLGNIARINHALESMPKQLAEAQTKLENVEHQLETAKAEVQKPFSQEQELAEKLDRLSALNALLNMDEKGNDGIGMEDEPETSEGDREVADRSAKNIPLAEKLTDTGQNKGGRQYTDVPAARVSLKEKLEAFKVKAAEGDADKATPKKAKDKAEILMNTAVYSTGDKILNVMKEMDMSIPGLAELSGIHENTLLNILAGIKEPDIGTACRIADALGICVRELCPDEEQYAVFIKKDTLAKLIVISEINGVEPDELIASILEKGIEENGFYDMSETMENAALNSGEIADRTPAAKAEETKADKFIRLGEYRMNKAIDAIGRIENLANRSAYEYTPEQVEAMFSVLESKVAEVKAKFTVTKNKENAAFSFGNKAGQENMERAGAEDMGDNVERKGLGTPATRADIIEKLVKDGFVKREKKQMLPTEDGMKLITVLPDVVKSPKLTADWENALTLVAKGEYSMQEFMGGIEDMVRDLVQTYHSVSEEQKSMFGGGAQGINAGTALGKCPKCGGDVVKGKFGAYCKNKCGMNVGRAMGAVLSDSQIKSMLEGKKTLVKGLKGKKGTYDAYLIPEGIEDYSYTKDGKEIRGSQYKVRLEFPKRKKMSNKTSTPANASPLTVKEAEQPDIVKKIGNTTYRVKIHFSTTSKETMSDKIKRLIMNDCGKISMYYTQEQIDRANQADLVSFLQSQGEQLTRAGNEYRWKRHDSLTVRGNKWYRHSQSKGGGPVDFVMEFFGKSFTEAVELLTGEKGAAPPPDRHCPAPLSDFRLPPRSTDNRIARNYLTAARRIDEDVTGFFLSNGDIYEEAAHHNAVFVGRDESGIPRYAHQRGTAGSFRLDVKGSDKSFNFCYRGEGERLFVFEAPIDLLSFLCLFKKDWQKQSYLALGGVGEKALLRFLSDRPNIKTVYLCLDSDQAGNDACSRLVELMPEGLTVHRLVPLYKDWNEVLQHRAEIADGKYIREAIYGVKEPPQEETVEIIRMSEVDTQTVEWLWKPYIPFGKVTIVQGNPGEGKTTFALRLAAACTTGGTLPGMKPLPPFQVIYQTAEDGLGDTVKPRLIEAAADLDRVLVIDEAKRELTLSDERIEKAITQNGARLIILDPIQAYMGEKADMNRANEVRPIFRRLAEVAERTGCAVILIGHLNKAAGGQSAYRGLGSIDFRAAARSVLLIGRVKREPNVRVVIHDKSSLAPEGKPVAFCLDPETGFEWIGEYDITADELLSGAGGNTATKTEQAERLILDLLADGKELASEDIVKAAAEAGISERTVQNAKRNMGGILGARRVGGQWYNFIKKKQPPEPASMKRQLQGIALILVSILLMLGYGNVAFFDLSFKWALIFSVIGITGVIMTFLPDKKMRRFAAIPAHPQKQYTRRWRLYHFCGFYYPIREVIPIAIYHWNIGIVSRGKGKSAVAAAAYRSGEKLTNEWDGMTHDYTRKGGVVHTEIMLPPHAPPSFSDRSTLWNSVELYEKAGNAQLAREIDAALPIELSREEQIRLVREYCSSQFVSRGMCVDFAIHDTDKGNPHCHIMLTMRPLDERGTWTAKSKKEYDLDENGERIRLPSGRYKTHKIDLTGWNDKDNTLLWRKAWADYTNDFLERNGSPERIDHRSNAERGIDELPTVHMGVAACQMEKKGVATEKGELNRSIQKTSRLIREIRAQIGKLKEWIADLFKARETAPEPPPQSPNLANLLMKYLSVQREKSRKYSQSWQHQHAADELKTIAAAVNYLSEHGISNLDELDASLSSVSDRAYSIREGMKTAEQRMKELQKLMEQGRNYQTYKPIQDEYRQIRWKGKQEKFAEARRAELTLWDAANRYLHANLPKGTKTLPIAEWEQEYADLKTQRDSDYTKLKDTRAEVAELQKIRKCVDIALRADQPEQTQNRAKRHEQERMTKPREKTREELQAEIEDGKKKIRQFENREKMLRQKLSKEERRTRSHRLIVRGAVFESIVPEAKNMTDEEATALLRLALTSEPAREYLKKRAEGATSMNAKKFSDAMSELDTKYVDEALNYKKKAKKPIWVKWGAIAACLCLMIPLTAFAVDIIQYNAAVDYLNSLGIAVEDLSDYSHKEIKEAAKTIDAGESNPLTEEILSLIPENKEPLDTPTQVTSEQIKELTPTMTREDVLSLLGDTQDVGSGIYIYLYEVDQQYLLRIPFASDEAQLGVTGEDLLKALVPISGDIAPMVYVNDTLYQIVDSQPNFADEKSSFNLLGKIENTVSSSEEPKENFQANDDIVGAAVYQYGDNIVVEFEGKYWLYEHYHNTDFDGNSDMIDDEKIIEMFFGRSEQGIRELDIKYGKVCHNLSYHIVGSRQDAEECVNDAYLGAWNAIPPARPNPLLSYLVKIVRNISLKIYWRKEAAKRSSHYTIALEEIEACIAAPNTVEAEIEAKELARIIEAFLDTLTTENRVIFMRRYWFSDSYKDIAEFMGLSEKNISVRLTRIREKMKQYLIEREVFVMRTGLTKQEKTTDIWFDEKDPLIHIRTHNTDLKKRLAVYAGQYPDQCRQTDADPETGCMEFDIAKGRFSFRLTAPYSEERRNAASKAAKKHSGNLTHPIQKDVLMKPKKLGNGKITALYERLSRDDDLTGDSNSIINQKKMLEDYAKANGFTNCVHFTDDGWSGGSFDRPSWKRMIEGIEKGEIAAVLVKDLSRVGRDYLQVGFYTEVMFREKGVRFIAITNGVDSDKRESSEFAPFLNIMNEWYIRDCSRKITTVLRARGMSGKHTSNHCIYGYRKDPNNKDHWIIDEEAAEVVRRIYRMAIEGKGPYEIARILATEKVERPSYYLAQRGMGNHQSNYNAADPYTWRGGTVADILSKQEYMGHTVNFRTYKESYKDKRVKMTPKEDLVIFENTQEAIIDKETWERVQTLRKTIRRTDSIGKANPLTGLMFCADCGAKMYNHRGKAGNARDWAGRPNGKKRPDRDEYNCSRYDLGNQHYDKYCTTHLIRTAVVNELLLEAIKGVCDYALSSEAEFMAQVCSASEARQEKAARAIRQRKQRNEKRTDELTRLIRKLYEDNVSGRLSDTIFEQMLSDFEAELSDLTEIISQDQQELERISRETINAEKFLSLVRKYTDFSELTPAMINEFVEKILVHQAQGKGASRTQEIEIFFNFVGKVDIPHKEVKLTEEEKAALAEQERRRAKKAEYNRRYMEKKRRQWKAQQEQEQAKQLPPAAEQKGEHIAMQLVIAEKPSVAQQIASVIGAEERKDGYMEGSGSIVSWCVGHLVELAQPDAYSDAWKKWTYESLPMIPENWQHEVKRDTAAQYKVLRELMHDTRVDSVVCATDAGREGELIFRLVYEMAGCNKPMKRLWISSMEESAIRDGFANLKPGSDYDCLYQSALCRQRADWLVGLNGTRLFTVLYGGKVLKVGRVQTPTLGMLVERETQIMNFRKEQYFMAHILCGGVDAATGRINSRAEAETVAGACKNGQAVVTSAAKEQKSIAPPKLYDLTTLQRDANRLFGFTAKQTLEYVQSLYEKKLATYPRTDSQYLSDDMEQTAKSVIEAIFGSILFQEDVMFNPNIKRVLNSKKVTDHHAIIPTMEIAKADLSTLPEPERKILSLVANRLLCATGEKHLYETVKAELSCGGHTFHASGKSVTHNGWKDFEDAFKRAFKTIEEKESTEEKKLPELTEGQTFENMQTKISEHYTTPPKHYTEDICCERGIRNHPMKKYSVILADPPWQYKVYSKKGLGRSAESHYPTMNIEDIKALPVADIAEKDCALFLWVTFPCLLEGFEVIRAWGFTYKTVAFVWVKQNKKSDSLFWGMGYWTRSNVELCILATKGSPKRVDAGVHQVVVSHIEEHSRKPGEVHERIRRLMGDVPKIELFARRKAEGFDVWGNEVDSDIEFKGGNRLCSMGKETGMKETVDNVLDDIAAKRAAASEKAGQENRETSPKKEFKEITMKFGKGCVGEEFQGKDGNKYKEILVPNPDKNDHRPWQTFVVKANHVHEDKFGKGMWIKLPAEGHTTLRRPVVVGEKPDGKKEWGTEKNSIANADLKKMVEAYKERPRESVKGRLAEKKAEAVTQKPAQKTQSKSKSKEAELMKKIKLSTKAVLSLGLSAVLFCMPAVGFALNGNYAVNVHAEDSKEQEAVSEEPAESTGQTEADTEQSAEGGTEESTENTTEESTENGTVSGNEVTEPVCTCEKKCSAYDYDKDCEVCAADYRDCEYKTPNVVININSPGGWYNERATVTFTVSDTAHTGNFEIAMIQAKVGQNGSWTDVTEDKKLEISENCTVYVQVTDQKGNTYERNRAMKCFDTTKPTLNAAVSDGLLSIQVHDTDSGAKAVYVNGYEFTDLTNGTLNIRLQQFDAGYEYFTISAMDNAGNMSEVYKTKNPYYKDPADESDENPAEQLPVNAEATKPGSATGTVTEHTKTDSDGNTISQTPEEQKKQAFAEADAAEAAESGDKEQSEQGKEFYTIQTASDKVFYLIIDRDGEEEMVYFLTEITENDLLNTTSDNSETLPKNSAALESAIPTTESALPNNNTDKESEPEEDTESESTEEESTEETEPEEEAGEEASPIASYIIIGILAIAFIGGAYYFKVVRRKKEDFIEDEDEDEEDTEEYENEDEEQEDSSDDDFFDDDRESDAADTTEMTKERIEKELQKVRQQLATLQERQKDLEEQLQMAEDAEKMKFIEKNKISLDRLILLNKVSEEEILHLLKQKEQEEQTRQTEREAVSHEKNMAEIKKAQAAGFAEDSNAFAGGSSVKGTAAPKKAQQKQSGVHQPRDADDTSGQNVQRSGQAETFGQDVQKQTKTSDSRKAKGGQRKQHRKQGAFGQSDKMSENADAGSQKKSDFTKENSTFTEDNGTAQEERQSGDDYRRRDTYHQAEKRGHYRRRKQREHTDRERTKTSDFEQDFNTKDNAFTEGEKTEFQGSKKLDKLQKKAEKAGRKTEAARRKLPKKTEYSLERVFDEKTGRAKYVLTAVKKEKPFKPDSPVKRMAGRAGSEFTNYAHGKVAEVEKENAGVEGAHKSEQKAEDAYRFVKRHHKNRLQRRREKVAKLEKKQFQKEVNFRYRKFLEENPEMQEKTLKKQLQKRLQKQRIKREYAKARRAGQAAKNTKEAAVKSANFTTTVAKKLQEAAQKHAALLVTIGAFAVLLIMIMTSISSCGAMFSDGMSTTLAGSYMSVPAEMDAADLAFSELEKNLQAEIDAIETDYPDYDEYRYNLDAIGHDPFALISYLSAVYTEFTAAEVQGEIESLFDEMYELTLNPTTETRTGTRTVTDPETGEETEEEYEYEVSILEVTLTAKDLGVVAAGHMNEEQKEIYAFYNETHGLVQQFYTPLDLYWYNYVSSYYGWRINPVTGQEQLHRGVDIAVPTGTTVYAAMDGTVTTAAYDDYYGNYVVIEDSKGYCTKYAHMDTLSVSTGQDITHGTVIGTTGNTGSSTGSHLHIECLYNGEYYNPLFYFEAGEKTLYGETPGSGSGGGGAIPPDSYNDETVQALMEEAAKYLGYPYVWGGSSPSTSFDCSGFVCWVFTNSGVHNFPRTTAQGIYDQCTPVPAADAKAGDIIFFTGTYNSGGAVSHVGIYCGNGVMIHAGDPIKYSNINTSYWQSHFYAFGRLNMYERRRKVMETDTIIHNDCLDALKDMPSESVHCCVTSPPYYGLRDYGMDGQVGREATPEQYIRKLTEIFSEVYRVLRADGTCWLNISDTYCGTGSKGGYKDPKNPEGRNGQNVSIVRNVEGCKHKDLIGIPWMLAFALRNSGWYLRNDIVWQKGNAMPESAKDRLTRSYEHIFLLAKSQKYYFDALAISEPIAADTARRYMGGRGSSHKYSGEVPGQAGIQKLNKPRKAGEIKKSDISPVRNCRDVWLINTVPYRGNHFAAYPPKLVERCILAGCPKGGIVLDPFFGSGTTGLVAVRNDRHYIGIELNEEYCVLAGERIGGGYENKADMKKKPQAETQGRQVRAAKPKAGLSFSERKRLMELKRTLSGNSKKQEKPTTAQNTITFKKMFQDGICQVTSTFYTKMVEFFDINYDLLEIEDQGEILEEYSKLINYFDPSIKFELFLFNRQVNEQTLIEQFDIPLQGDEFDDIREEYTEMLKKQAAKGNNGIIKSKYLIFGIECKGFKEARAKLASIEADVIKNFLNLGTHARSLDGKERLRILHEYFNQDTMEPFRFSFKELSESGKSVKDYIAPPGFDFRYPSRFKAGKMYGSVHYLDIIAPRFNDELLKKLLDIDDNLTITMHMQTFDPVKAIKMLKGALTNIQKMKIEEQKKAVRSGYDMDILPTDIITYEKDTLELLDDLNTSNQKIIKMTFLITCYGRSKRELENITQRVSGIIQQANCNLRCLQYLQEQGLMASAPIGCNETGIERVLTTKSTAILVPFCTQELFMPAPAIYYGLNALSNNMIMADRKRLRTPNGVILGTPGSGKSFSAKREILSCFLMTRDDVIICDPEGEYFALVGALHGQVVKLATNSKDYLNPMDIQLSHKGDKEALKLKSDFIITLCDLIAGGKDGLENDEKGIIDECIRHIYDGYFENPVPENMPILEDLYNALLKHKNKKAERIANSLVLYVHGSQNYFNHRTNVDSHNRIMCFDIRDLGNQLKELGMLIVQDAVWNRVSQNRERRIATRYYCDEFHLLLKEKQTAIYSVEIWKRFRKWGGIPTGLTQNVGDFLKSEEIEGILGNSDFVYLLNQNAKDQAILADKLGLSEKQLAHVTNSEPGSGLILFDNVVIPFVDKYPKDTKTYAIMNTKPEESVKQEENNVMNLTKRQLVCFGSAGAVGIPFYIFTKGVIGTQASALIMVALMLPFFFLAMYEKDGFPAEKILYFMLRQKILTPGIRPYKSENLYRQLEEKERMKKEVRYLEEKAAGRNAGQAGMVRRRVLTLLYVSVAPVPFATLSNREWGSIGSNYIKGLCALAFQGFFIMVCVGIYSVLVSGVAVAGNLHSALWSVAAYTVILCFSLFKTGSLSKSIFNAHMRSPENVLESLKSKACNKSYKYERLYRNLYNPQFYLLAYQRIQAKPGNMTAGTDGKTIDGMGMARINALIEKMRDFSYQPNPARRTYIPKSNGKMRPLGIPSFDDKLIQEVVRLILESIFEPTFSDYSHGFRINRSCHTALKYVQKYFTGTKWFVEGDIKGCFDNVDHHVLIAILRKRIADEHFIGLLWKFLKAGYMEDWNYHNTYSGTPQGSIISPILANIYMNELDSYMAEYAEKFNCGNRRKINPAFKKKLDVCRGKEQRLKRNLSKMSEEEKEGLIAEIRELRRSLKSMPYSDQMDDSYKRICYIRYADDFLIGVIGSKEDAEQIKQDVGCFIRDKLHLEMSEEKTLITHGHDAAKFLGYEVTIAKGEHNKKTKTGATRRVNNGKVLLYVPHDKWVKRLFSYNALKIKYDKQNGNKEVWEPVRRTRLLHLDDLEILNQYNAEIRGLYNYYRLANNVSVLNNFYYVMRYSMLKTFAGKYRTRISRIIRKYRQGKDFVVEYPKKNGKVGKVLFYNNGFRRDTKVESGNPDIVARIFENYGRNSLIKRLQANRCEWCGAENVPLEIHHIRKLKDLSGRKQWEIAMIGRKRKTMALCVYCHDKLHAGKLDMGAIIDKITEFIKEMLQGWVLDNLSTMFTDVNDKVGTIAGEVGKTPSSWNSGIFSMIQSLSENVMVPIAGMIISAILCYELITMVMDKNNMHEIGSEFFFRYLVKACIAVLFVSYTFDITMAIFDVGNHIVTKAAGVITGNASIDVTATLQTMFNTQLSTMGIGELIGLGIETMIVSLCMKIMSVLITVILYGRMIEIYRASRSAAFHPKAVCGHFGNPALASRMSFFTTAVTGLKTVVTAIGAGVAVWGVINLLEGYGNDNPGAKSQGIKQLMAGGGIVIVAQTVIPQLTSLFSMSSIIAGITKDLKAVPENLKAKAKGADAKKLLLLNVPYILAGYFCDKVAWLWRVSEGADASAKMIAAMNGFDTLFSNPLPSFHPRDLLIGAGCGIALRLVVYYKAKNAKKFRHGKEYGSARWGNAKDIEPYMDSVFENNVLLTQTERLMMSGRPKQPKYARNKNILVIGGSGSGKTRFFVKPNLMQMHSSYVVTDPKGTVLVECGKMLKRGKYKIKVLNTINFAKSMHYNPFAYLRSEKDILKLVNTIIVNTKGEGQQSGEDFWIKAEKLYYTALIAYIWYEAPEEEQNFAMLIDLIDASEAREDDENFKNAVDLLFEELEAENPNHFAVRQYKKYKLAAGKTAKSILISCGARLAPFDIKELRDLMEYDELELDTLGEQKTALFVIISDTDATFNFVVSIMYSQLFNLLCDKADDVYNGRLPVHVRCLLDEFSNIGQIPQFEKLIATIRSREISASIILQSKSQLKAIYKDNADTIEGNCDTTLFLGGKEKTTLKEMAEILGKETIDLYNTSDTRGTSQSYGLNYQKTGKELMSQDEIAVMDGGKCIMQLRGVRPFFSDKFDITKHDRYKELSDYDPKNAFDIEDYVKHLHHMKVTPATMVDDAFDCGEVNGQEDNSSMTTEMQEEVTQKTIALVIKTSKLSASVLKAAMRIYLNHQKQKSQKSHGKTSVKKLVGEGVGVSSIEVTDSNIKSFERVARKYNVDFAVKKDRTCEPPKYLVFFKGRDADALSQAFKEFVYGNEKKKGRTSVREKLKHFREAVSQDKNRERSREKNKDRGQSLMKQNHHSLAYKRQKQPNKTYKDLKQKQKMKIADQMFRETCSYYKENGEMPTEEAAREITERIYKKLESQAVWVPFDEVYQAYLLKMPRYEIRIRENGIPEEKPAKEKKPDLPKKKRGSNNKICPECGRKMKQQFIGLQHCKCGMSWKKDIGYFERTGDMVFALERRKTGKKTKQCPVIRYRMESMRDINRVMEREVAKGSCPLAFERMEFGSKPFQFIISEEKLNEVLTYLLRIRTFGQYAGKSIINNVYMDLDMLCKKPQFKRTRSVVEREEVYTKVQRYKRKLKPEYDGRVCLETVQCIFSLPEKETDRYRMIYEGQETYGFIMSNKYILGLFAYCEAARKTIVWDGVEFEHLTEQEQKIVLLDNVRDVLFQALLFDNVSMEKNHIRADMCTVMLLEMEKKVYITKEEQEKCRRVAEAFAELYGLENILVMDAGRYGFVKLQYYKEPQGFDDVITFTDSQSMFENLWQEWLDTKLYLMAKGTPLMEKGYGGVLKSLPEEKQKELTDRKADFAIKAGITLMGGTIKFDYYYGIEAEQFSFYRVPRLLIKDERFKGLSSDAKLLYGLMLDRMALSMKNGWLDDENRAYIIYTVDSIMEDLGCGKDKAIKVLAELDTNKGIGLVERIRRGLGKPDIIYVKNFVIPEENDEQPDKQGGDKGAFTEDGEADLQKSEKPTSRSLRSRLQEVGKTDFKDSDNQTSGGRENELQEVGKPAPNYTDYNNTDMSYNNPINQSGDPEQRNDKIDVMEDVNAYIELIKQNIEYEHHMKYDKRQDRDLYEELFEVICEVVCVKRKTVRIAGEDYPYELVKSKFLKLNSGHLEYVIGCMHDTVTKITNIKAYMVTALYNAPSTMNHYYQQEVQHDMYGGGWEEKGIVMSKAGSASKVKINSFDDLFGASQAPAGTEQVREIPLSELHEFKGHPFKVLDDEKMQETVESIRNYGVLMPGIARPRAGGGYEIIAGHRRKHGCELAGLSTMPMFVRDYSDDEATVIMVDTNIQREDILPSEKARAYAMKYEAMKHQGKKGSGSSLDEVGEAAGESGKTVQRYIWLARLSDELLDMVDKKKIGLVQGVDISFLTEQAQEWVQVILEETGAAISTHQSAKLKEYGKNGELTLAMVRLILTEEKPKERKVTIKGERISRYFTEEYSSEEIENIIYQLLEEWNAANGVSKQMCKVISIANQKGGVGKTTTTSNLGIGLAKQGKKVLLIDADAQGSLTASLGFTEPDKLEVTLATVMANIINDEEMEKGYGILEHEEGISLMPGNIELSGLEVSLVNAMSRELVLRSYIEQVREDYDYILIDCMPSLGMITINAFACADSILIPVQAAYLPVKGLEQLIKTIGRVKRQINPKLEIEGILLTMVDNRTNYAKDISALLIENYGSKVRIFQNSIPISVRAAEISAEGVSIYRHDPKGKVASAYQSLTEEVLRDEMLKVRLMGTKNDITWFGKILNNNSKIEVTEFSDLYPNKGTKKFYRAYVEVRKSNVAEKSMNSTALGAEKKENIIFISDAHEKFYYEKLKEVRYQDVYHKALCYCLGISDDTRRNIKSIYDFKTGCVKTECLQEGWQTSGSVKVVRMAFNLYCNGTPSVFDYEDMEEQIDECRNYTVEELFCCAYAPYFWQAVQIRYPEYARYNRELYALFGGADMAEQNNNQQQDVNQLLKVRYDKLHELQENGKDPFVITKYDVTNHSTDVKEHFEEMEGKEVSLAGRMMFKRVMGKASFCNIQDLKGRIQIYVARDSIGEESYADFKKYDVGDILGVKGIVFKTKTGEISIHAAEVTLLSKSLQILPEKFHGLTDTDTRYRQRYVDLIMNEDVKDTFVKRSKVISTIRRYLDGQGFMEVETPMLVSNAGGAAARPFETHFNALDEDLKLRISLELYLKRLIVGGMERVYEIGRVFRNEGLDTRHNPEFTLMELYQAYTDYHGMMDLTENLYRYVAKEVTGSEMLTYGEHTMDLSKPFERITMVDAVKKYAGVDFNEVKDTAEAKKLADEHHIEYEERHEKGDILNLFFEEYVEEHLIQPTFVMDHPIEISPLTKKKPENPDYVERFEFFMNGWEMANAYSELNDPIDQRARFAAQEEAFAAGDEEANHTDEDFLNALSIGMPPTGGIGFGIDRMVMMMTNSPAIRDVLLFPTMKTLSKENQMDKKNILTYEGLKKLEDELEDLKVVKRKEVSQKIKEAREQGDLSENAEYDAAKDEQRDIEARIEELEKILKNAEVFVEEEADLDKVSIGCQVKILDCEFDEELTYKIVGSTEANSLKGKISNESPVGKALLGKKIGDTVTVTTPAGEFEYKILSIHRSSNEMSYSNEFLRNFRPVFLAILKAQSFRPERVELVVIDEEQSHVFEPADVRDVLEQIGDDLNYLTVYTGRPAYFSGFAERMYEENGLVVMVFPKTRLSAWEGQAGVRETFLTRKVILDFEWEGAYRTEMICAAATYIPIHKKPWKQGENLDIMVPIGYNTVIVKSMHHQREKLGRDRFEEAFYENMAIIRTLQIGNVTLENNLILAPMAGVSDLPFRLLCREQGAGLVCMEMVSAKAILYKNRNTEELLTIDPKEHPVSLQLFGSDPDIISEIAKQIEERPFDILDLNMGCPVPKVVNNGDGSALMKNPRLAGEIIEKTARAIKKPLTVKIRKGFDDAHVNAVELAHIAQESGAAAVAVHGRTREQYYAGHADWDIIRQVKEAVSIPVIGNGDIRTPEDVAAMAEQTGCDGYMIARGAEGNPWIFRQILHYFDTGEHLARPDFSEVTEMLLRHAKMQIDCKGDYTGIREIRKHAAWYTAGYRNSSKLRGRINEVENYEQLEALFREVESYNEKNGYEAMIMTIDVGNTNITVGVFRGDEVVSNFRITTKMPRTSDEYGMLLSNLLEQNSISHDDIEDAIIASVVPNVMHSLEGAIIKYFSIRPIIVEPGTKTGIRVVTENPRQIGADRIVDAAAAYELYGGPVLVLDFGTATTYDLVDKDGAFVSGVTAPGIRISAKALWEDAAKLPEIEIRKPASILAKETISSMQAGLVYGQIGQTEYIIRHMIDEANMGEVKVVATGGLGRIIANETTMIDVYDPNLTLKGMNLIYKKQNRKSGKIKMEEVVLCGASAYNKKFYLNEDFKGLPEQIKNELKIMCVLFTEDVGGIFQLVFSETGELEFRTSCDENDLLYDEIGCGLKIRQLQQTKQELLEALQMYYKVLYVGIMKAELLSVLRDADDYVSGQDLCEKFGVSRTAVWKGINQLKEAGYEIEAVPNKGYKLLSVPDTLSEEELKSIRKTAWVGQEIFYYPVIDSTNTRAKQLAEEDYPTGTLVVAGQQDAGRGRRGRSFESPQGAGIFMTLMLKPELSPVNAPMLTLVAALAVSAAIVKTTGRPAGIKWPNDIVMNGKKVCGILTEMSAQMDYVNHIVIGIGINVHNESFPEEIAPVATSLYMETGEHFNRAALIEEVWEQFEHYYAIFMETEDLSGLVKEYDTHLINRNQIVKVLDPKEPFEGKAMGITPRGELIVDTWESRRLVSAGEVSVRGVYGYVMNLKGRNFLKLMDYTPEEILYLIDLAADLKSKKKQGILHDSLIGKNIALIFEKTSTRTRCSFEVAAHDLGMHVTYLDPSGSQIGKKESIPDTARVLGRMFDGIEYRGYGQDIVEELAKYAGVPVWNGLTNEFHPTQMLADMLTVREHLEHLKGVKFVYMGDARYNMGNSLMVTCAKLGMDFVACTSKKYFPNEELVDYCKKVAAGTGASITLTEDVAEGTKDADVIYTDVWVSMGEPDEVWAERLRDLMPYQVNKAAMANAKPTAIFMHCLPAFHDLKTKIGKEVYEKFGYSELEVTDEVFESEQSVVFDEAENRMHTIKAVMLATLGEMGGLLVAFLILVILVLAVVVSCIKIVPQAHAYIVERLGGYLATWPVGLHLLIPFIDRVAKKVTLKEQVVDFPPQPVITKDNVTMQIDTVVYFQITDPKLYAYGVENPLMAIENLTATTLRNIIGDLELDETLTSRETINTQMRATLDVATDPWGIKVNRVELKNIIPPAAIQDAMEKQMKAERERREAILRAEGEKKSTVLVAEGKKESAILDAEAEKQAAILRAEAKKEATIREAEGQAEAILKIQQANADGLRMIKDAAPDQGVIQLKSLEAFAKAADGKATKIIIPSEIQGIAGLAKSVTEIALENKMAEPWEMTRHFLRLFLYFQIKYSNMIFNGENSVRDPDRKMSLKKRAIEGIVVAGSLVMMSTIAQAADLDGVQVRNAAVQAETDFATGGTAGVVARLDQLEAEAFGDIEAATAGVNQTGRLLVATAEGAVSDTEAAETLDAQLQQAEATEAQQADAEQSVTEAAQSQADGEQTADAEQTDAGGQPEDAQSTDADQMSAEEQEWQNRLMADVDDFLYIRESGDENAAIVGKLYKGDVAEITEAGDTWTHVESGNVDGYVKNSYCVTGSEAYTYANDTFDTEVEIQTNGLRIRSSADPDASVLAAVSTGMTFPLDADAETVDGWVAIDYKGTTGYVSAEYVTTELALGEAVTIEEEQAAAAKAAAEAAKSAQVSSAGTVQNSAVAASVDDVTLLAALIQCEAGNECYEGQLAVGAVVMNRVRSGRYAGSIYGVIYQAGQFPPAGRGSVASIAANGPKSSCIQAAQEAINGADNTGGATCFSRASRGHAGVVIGNHVFYMLWLEHISPEQLQMGIAVCSLLTVLLLIVTLHKINRIQRYIQKKQTGTDRMESAEFGSAFPAEGVSQCEAAAEGAKKYPADMLIDEVIEEVFSMMPAWDVKRLSQIAARSRGKPLFKSVQIPYNIEEIGQEKVMKKIVMTGGGTAGHVTPNIALFPALQKEGYEISYIGSYEGIEKRLIEEQGVPYYGISSGKLRRYFDPKNFSDPFKVLKGYHQSIRLLKKLKPDVVFSKGGFVSVPVVLAASRCHIPAIIHESDLTPGLANRIAIPKATKVCCNFPETLAHVPEDKAVLTGTPIRAELLSGDAGRAFALCNFTDSAKPTLLIVGGSSGSRAINTAIRDLLPELIKNYNVIHLCGKGNADASLNAIAGYAQFEYANEELADLFALSSLVISRAGANAICELLALRKPNILIPLPAAASRGDQILNANSFRSQGFSYVLEEEELTNTTLLEAIDHVFHKKDAYIDAMEHSKVTNSIETIMGLIREASSHKMEIGFKKCGISNQPDVCIFDDPCLSKFGALMAKYRFEQIAINSTEKKKPVEEDRFTYLGLEHLDSGSLKVTRFGSEVAPIGEKLVMHKGDVLFGKRRAYQKKVAIAPFDGIFSAHGMVLRPREDVIDKSFFPLFISSDYFLDAAIKISVGSLSPTINWRDLKTLEFELPDLATQRKLAETLWSINETMEAYKKLISATDELVKSQFMEQFGNLDSNTKHYPIKKLSEIAMSKVLLGDVAVEHKETCKGSKDGYPIVGLEHLIPEEITLTAWNEGSENTFSKMFRKGNVLFGRRRAYLKKAAVAPFDGICSGDITVIEAKPDRILPELLPFIIQNDDLFEFAVGKSAGSLSPRVKWEHLKNYEFELPDMGKQKELAELLWAMDNTKKSYQKLIAATDELVKSQFIGPAGHKDFTGHTASARRCAMSKRITIEELQSYLWNSAVLLRTNIDAGAYKQYIFPLLFFKRICDVYDEETAIAIEEYGDDAAEFDADEIHTFVVPKGYHWNDVRAVSENVGVAIVEAFRKVENANIDKLQGIFGDGAWTNKNRLPDRLLKDLLEHFSTKTLSIANCPEDELGQGYEYLIKKFADDSGHTAQEFYTNRTVVHLMTEMLKPESGESIYDPTCGSAGMLISAIAYLKEQGKEWRNVAVYGQEINALTSAIGKMNLFLHGVKDFNIVNGDTLKAPAFVENGRLKKFDLILANPPYSISQWDRAAFESDKYGRNFLGVPPQGRADYAFLQHIIASLKDDTGRCAILFPHGVLFRNEESAMRERLVRSDKVECVIGLGPNLFYNSPMEACIMICRMNKRPERRGQVLFINAVNEVERKNAQSYLEERHIARIATAYDNYVDDADFAKVATIQDIANNNFSLSIPLYVKPEVNEEEIDNRNVQEHYDSWLAASEMMKLSYEKLNALLVKEADVNEMIGAIIGDIVGSRFEWDNHRSKDFDFLTHQCFFTDDSVMSLAVCDALMHCKPDYSDLSNITIESMQRIGRPYPHCGYGGSFYRWMYSDNPQPYNSYGNGAAMRVGGCGYVANSVAEAAALSRAVTETTHNHPEGIKGAEATAIAVYLARTGSSLMEIQDYIVKNYYPINFTLDSIRDTYQFNETCQDTVPQALEAFFESTSFEDAIRNAISIGGDSDTLAAITGAVAEAYYGVPTNIRKHALTFLDERLLKILLEFENKYPAKFEKIQESGSVGVKPSTGKKVKTGGRAEMMQSAMDIADMELEASAAHPEETTSQKLFSHLFEACNILRGPINQDEYKSYVTPILFFKRLSDVYDEETQVALEESGGDEEYASFPENHRFVIPEGCHWKDVREASENVGVAIVTAMNGIERANPDTLSGVFSSFDDANWTDKTKLSDERLKDLIEHMSKIKVGNNNYSADVMGDSYEFLIKKFADLSKKNAGEFYTPRSIVKLLIMLMAPKAGETVYDPACGTGGMLIEAIRYMHDDKLTYGKIYGQEKNLATSAIARMNLFLHGARDFKVTQGDTLRSPNYLERGSLQTFDCVVANPPFSLKNWGAEQFSSDIYGRNIWGCPTDSNGDFAWLQHMIKSMNPKTGRCAVVLPQGVLFRSGKEGEIRKHLVESDKLEAIITMASGVFYSTGVSACILFLNNDKAPEHRGRICMIDGSGIYTPQRAQNIMTEEDIQTVFNYYMEYEDVIEKVKIVTIPEIREKDFSLAINNYIEKKEQEIVPPAEIRRQYFEAYKEMIAAEEKMRKLLLEGGYISEMATIFNEDNTIEQMMLSTLQKNGWKYIPAEELPRMYSDVLVEPMVKEALIRLNPEIAEDPSRADEVIYKLRTLVLSVQPHNLVTQNEIFKKMIFEENSYPFGKDGRMVPIRFFGTMRKEDLALNEYVVTNQWIYPQAEGGKRLDIVLLINGFPIAIGELKTPVRSAITWLDAAGDISAYEKSIPAMFVTNVFNFATEGKCYRYGSINMPINMWGPWHTATHKSEGSLADVKISVEDMISPKNVMDIFQFFTMFATDKKYRKYKIICRYQQFEGANMIVNRVIAGYPKKGLIWHFQGSGKSLLMVFAAQKLRMIPELKNPTVVIVDDRIDLETQITATFNASDIPNLTSAATKEELLSFFRGDMRKILITTIFKFGEVSGELNPRDNIIVMVDEAHRTQEGDLGEKMRMALPNAFFFGLTGTPINRVDKNTFATFGAEEDRTGYMSRYSFSDSIRDGATLPLHFEPVPVELHVDKEKLDREFEAMTDEAGLSKDEKNELSRRVNMKAIMYNPARIRKVCEHIAKHFKEKIEPNGYKGQVVVYDRECCLMYKAVLDELLGEEASTIVMDTNNDKEDRYKKYRRDRDAEGKVLDTFRDPASPLKLVIVTAKLLTGFDAPILQVMYLDKPMKDHTLLQAICRTNRTYDQGKTHGLIVDYIGIFDDVARALDFDENSMRKIITNIEEIKKQLPTLLKKCLGYFLGVDRTIEGWEGLMAAQECLPTNKEKDAFAADYRVLNRAWDALSPDVFLNAYKADYQWLSRVYESVKPTDGRGGLIWASLGAKTIELVHQNLTVGEADEDVEILAMDADLIDEFLEKQKDLKKTTKKIEINLVAKIMNHTKDPKFIKLGEKLEILREKHEQGLVTSIEFLKLLLELAKEAAQAEKEVVPEQEVDKGIAALTELFNGLKNRSTPVIVERIVADIDSIVKIVRFDGWQSTTAGKQEVKKALRSVVWIKYKIKDKDVFDKAYSYIEQYYMAVSYNRLFKMLIDRKMMKKELCELADVSPSTISKMGRGEIVSMEVIARICLKLNCTVDDILEILPDSPDYGTDEKIKMRKNLTEIVFILDRSGSMSGLERDTIGGFNSMIEQQKKAEGEALISTVLFDNVSEVLHDRVNVRDIRLMTDRDYTVRGCTALLDAIGGAIHHIGNVHKYARPEDVPEHTMFVITTDGMENASRRYNSEKVKQMIERQKAKYGWEFLFFGANIDAVETASQFGIGADRAVNYQCDGEGTALNYEVVSEAISSVRCSAPLSADWKKRIDEDYKKRGGRKHKMPLQIIRNDITKMSVDAIVNAANTSLLGGGGVDGCIHRAAGPELLAECSTLHGCETGNAKITKGYRLPCKYVIHAVGPRWRDGKHREQELLESCYRTSLNLAKENGCQSVAFPLISSGIYGYPKDQALKVAVDTISTFLLENEMMVYIVIFDRKAYQISGKLFADIAAYIDDRYVDEHTDSRVEQRRRLEALSEESCFEAAPVPLPSEAICKSCSSQSLEEALGQIDESFSEMLLRKIDESGMTDAQCYKKANIDRKLFSKIRSDKFYKPSKPTVLAFALALELPLVQMQEMLGKAGLTLSHSSKFDIIVEYFVERGNYNVYEINEALFAFDQSLIGAMAATRLIALHINKGKTVAQCLADRTDYSENAAKTEDGKYISAYACDAKTCDEEFLLSKRQYEHITGRTQAHDVIAYQIRQSFKPGEITPEEANKVGYETAMRFTKGKHAFIVATHVDRAHIHNHIIFNSTTLDCTRKFRDFHLSGLALARLSDIVCLEHRLSVIIRKPYGERQKRTEYPEKKSQRDEICEAIDAALARKPKDFRELIRILQEAGYEYKDGKQPAMRGKGHARFARFRSLGKGYSVEELCEVIAGNAVHKSKFAEKKRTSARSAQVHQRPELSFLIDVRAKMQAGKGAGYARWAKVFNLKQMAKAMMFMEEHGIKSYAELKEKADGISEKCDALLESVKADEARMSEVSVLRKHLINYAKTKDVFAAYKASGYNREFYEAHRDTLALRSAAKKAFDAYKKENGSDKKLPRISELNAEYAMLLERKKSSYAEYRKTKSEMQDWLVAQKIVQEILKEDEQKKEQMHEQEVRQEEENRQSSRMDIQFMKDYYDLRYEETDGENHFVDEAAYQEKQSEQSKMEDQLMEMVGGSESNVWKLYESIMCVYFDMEEIIKQAIYLQGAYDREQMLKMKIVCFLMKLVLKILLLPVAFLLRFLCFIGNLLMQLSLWVLSPVMLFVLGCGIYSVVRASWTDVFLLTLIEMGLFAAAVGAGGIMELMERLCECVEDVLTIMTAQTCGISIAHGTDETVCVITYFLQVFLLTSWCLTSGYDKMKMKRKTKGMSVREHWINVRVNPEELARIREKQKELGIRNTGAYMRKMAMDGYCVNLDLSDVAQVSTLLRRCSNNLNQYAKRANESGSIYAEDIRDLQKRLDELWEMQKLILKRLSGIRMMTKTAYYMQMAQEAAAQITGSKEQWTAFLTTSARLYKYPFAEQLMIYKQRPEATACAEYDLWNDRMNRYVKRGSKGIALLDMRSEQPKLRYVFDVADTGERKNSRPVQLWKMNAEHEQPIIRALDAAFDVPAGAGSLENHIMEAAERLARDYWEENRRQISDIVADSYLEGYDELNIGASFKRAAAVSIAYSVFTRTVGNADDYFEHEDFLDIFDFNTQAAANVLGTAVSEMSSQIFREIERTIRTYERDKQAERSQNYDGAELHEERRLPDSGHPVVGAGTEAPGQVREDAQSVSAGEQHAAVQSPDPDREAVPAPVGDSGDRDRTDGADDGGSSESESGTGQEIEPDGLGAAHEHAESAGRGSHSDGTYQQLNFMSLFQSEAEQIQKIDAAAENAAKEAESEKPSAFVISEDEIDRMLRTGSNFEGGKIRIYALYQQQGDVKERAAFLKAEYGLGGHSYTFMDGSRGFADYNGRGILLRNYDHDREVRLTWSAVDKRLDRLVENDQYLTALEMEEYRKLEQEYGAPLPMPTAAHVFPPTPPERYDTGNEHVDNMLNTAANVYARSELAAPQRFTVMETDDGYAVWDDIQDGIHVEPDGVSEEFTSEWEAETYRQQLIEKVQEREAKDWLYVEQSKQNLQQDIPFPDVESEEVTESAHAETDPLVLEMQEHASELSRESGYAPDERFVVTMTGKNFPDSKDAFAIWDYVKEEYYGYSDGKVQTFADYVSASEALQEIRGRNMEAEKEPATVQPEPAAPVQPDYRVGDTLYLDGKAFTIEKVGLFDVELRDPDSVYPIFRSESKENLARILGHEENVHLHNLVVDLNSGKKEAFRAGHEAKHAENYRINSFHLGEGSPKQKFRANMDAIYTLKALENQHRDATPEEQETLANYVGWGGLADAFEAEKTAWTGEYKELKAALTEEEYAAARASTLNAHYTSPTVIRAIYEALDGMGFEKGNILEPSMGVGNFFGMLPDSMLGSRLYGVELDSITGRIAQKLYPQAEIKVAGFETTDRRDFYDLAVGNVPFGNYRVSDKPYDKLGFSIHNYFFAKALDQVRPGGIVAFVTSRYTMDSKNPDARKYLAQRAELLGAIRLPNNAFRANAGTDVVSDIIFLQKRDHPIDIEPDWVHLGLTSEGITLNSYFVDHPEMVLGEITTESTQYGKEECTVIPIPDEDLGDQLHEAVQHIGGHYEAQELAPEEELSLQGETIPADPNVKNFSYAVVDGDVYFRENSIMRKADLSATATGRIKGMVELRTIVQELIDYQLNDYPEDAIAQKQRELNVAYDRFADQYGLINSRANAQAFSEDSSYYLLCSLENVDENGRLESKADMFTKRTIRPERAVTSVDTPAEALAISIGERGKVDLPYMSELLGTPGEFEKIQQELHGVIFKDPMTQGGEETGWVTADEYLSGNVREKLRVAELAAASDSAFAVNTEYLKKAQPKDLDASEIDVRLGATWVNRDYIQQFMEETFEPPFYLRRNIEVKFSPMTAEWQITGKSTPSRNDVHAYMTYGTSRANAYRILEDTLNLRDIRIYDTVEDADGKQKRVLNKKETTLAQQKQQAIKDAFQNWVWKDPYRRAELVEKYNELFNSTRPREYDGSHIRFGGMNPEIRLREHQQNAIAHVLYGGNTLLAHEVGAGKTFEMAASAMEAKRLGLCQKSMFVVPNHLTLQWANEFLRLYPSAKLLVASKKDFETARRKKFCARIATGDYDAVIIGHSQFEKIPVSAERQERILTAQIDEIENAIAEMKSQNGERFSIKQMEKTRKGLEARLEKLRATDRKDDVITFEQLGVDRLFVDEAHAFKNLFLYTKMRNVAGLSTSEAQKSSDMFMKCQYMDELTGGRGIIFATGTPVSNSMTELYTMMRYLQYGTLQQKGLTHFDSWASTFGETTTAIELAPEGTGYRARTRFAKFFNLPELMNMFKEVADIKTSDQLHLPVPEAKFETVVVQPSEHQQAMVAELSERAAAVHSGVVDPSVDNMLKITSDGRKLGLDQRLMNPLLPDDPNSKLNACVRNVLRIYEEGKSDKLTQLLFCDLSTPKNDGTFNVYEDIRAKLIQSGVPEEEIAFIHDADTEAKKKDLFAKVRTGQVRVLLGSTQKMGAGTNVQDRLVAVHHLDVGWRPADMTQRNGRIIRQGNRNKEVQVYQYVTEGTFDAYLYQTLENKQKFISQIMTSKSPVRSCDDVDEQALSYAEIKALCAGDPQIKEKMDLDVDVARLKVLKADHQSQQYRLEDKLMKYFPAEIEKTQGFIKGFQSDIRTVAAHPLPEEGFCGMEVNGTQFTEKAEAGEAILAVCKANQSLEPVPLGSYRGFKMELTFDSFQKEYQVLLKGEMTHRVPIGTSAAGNIQRLDNALAGIPARLEKAEQQLDNLRSQQEAAQAELGKPFPQEAELAEKSARLAELDALLNMDDRGNDDADRERTTEKPSVLAELRDRAGRIPPVTHRDDEEVALMRFTDDEWMLMMLYSPGTRTGLIAELQMMQKSLTGRDRNLRRWTASLLAKLAEMTDAEYEALDLYPDEMARIEKWDEVHGTQAPDERMMAFLDSATDQYAILQLRRIEDTVYERFSSMRELERMGLEPDIDHYEVVYTAPLLPYKDQNTMLEELYAKFNVSRPDDFTGHSLSVSDIVALRQNGVVSCHYVDSIGFQELPGFLKPENYLKAAEMAMEDDYGMIDGVINNGKKEEPAEKASVLDQLKEKQEAVPPAPPRRCCEEKELMKYKLTKVEQETVINFDNELDTASIYTHDSRLIKKLRELRKQYPEQFILEHREHGSVTYTIPKRCVGIRPPYSEKRREQQRQEAKENGLPFMEKGEMNDGKNMSMKMMNAAYLVDNVALLSLQEKQEGVEFHCFDMDRKVQIAEGHIGWDMLDKQPFSTLEESARVAALKEIPRLDGLTVAPVAPEMLEQMRGGRKVLWQMKKADPELENAKNIRFITSSYEDRFKIPDGSAVEIKYPNRKFSARCEYMDEYHLRLGYDVLHICQLAEMLERGGGTCRPEPLITEERSAWDLGSKGFLAIQTCEDGYDYTLYHKDFTEIDGGQIDNPEISMNAARDQILSDYGFGGRTMTRIDYDELCDRAEDAEISRRESVLGKLSDLSSRTDTPVKAAKAKEAERMKLVLAEKPSVAMSLSKVIGADQRGDGYMEGNGYLVSWCVGHLVELSQPEAYDEKYAKWRYDDLPILPEHWQYQVSASTKKQFGILKKLMQRKDVESLICATDAGREGELIFRLVYHQCGCKKPVERLWISSMEDSAIREGFQKLRPGTEYDALYEAALCRERADWIVGINATRLFSCLYGQTLNVGRVMTPTLAMVVMRDAAIRAFKPEPFYSAELKFRDFQAGGERMKEKAEAEKLVAECCQAGSAIITKVEQKEKSEKPPALFDLTSLQREANRQLGFTAQQTLDYTQALYEKKLVTYPRTDSRYLTDDMAPLVPELVSVIQQSFQIQADVPAPVNAAQVINSKKVTDHHAIIPTKTAASYDISSLPSGEQAILTMLAVRLICAVGTPCLYAETVVEAECAGQKFRTKGKTATDIGWRRYAGKPSEEAEKNAGASELPELSEGMTLELARVDLKEGKTSPPKRFTEDLLLSAMESASSDEFPAGVERKGIGTPATRAAIIEKLVQKGFIERRGDKKTKYLCSTDKGNALATVVPEQIQSPSMTADWEEKLLKIEHGEYDSDAFMGEISSMVSGLVKTYEAVKGADVLMQPERKVIGSCPACGSDVCETAKGWFCRDKGCKFALWKENRFFQTLGKQMTEELAKQLVNQGKARLTHCYSRKSGRYYDTTVHVETGEDGAAAFKLEFGGKKMNEREKIIRLWFDMWIKKADLGIDNIFTDDVVYTESWSPKYENRKTVKHWFDEWNTRGSVLVWEIKQFFHQGNQTIVEWYFKSKMNNGNVEEFDGISLIVWTQDNKIKSLKEFGCNLHNYNPYRDSDIPVFREEKANWFMKKMMAMLLASVMAAGTFTTTAFAYTGDDVQKNTPVSTAAQETDAAESTNAGKTDNTDSIEIDPDMQVLPDGYEVSTDADGNLIVTVGGKEYNIGSEKSQKQTGTVVPGITSLHFRSGPGMDQEIIGYLHSGDTVEIVEKCGDWYKVNFNGKTGYAHGKYLNVTDSAKDSSMFSEDALKLFLDLMQSGMSYEDETKSSAALTPEGNMTLVDDIGEEEDKSSQQFITLVTKAGNTFYLIIDRDKDGNQNVHFLNMVDEADLLALMDEEEAAKYREKEPEVTEPAETEKPQETEPAPEEQKTESEQKKSSPLPMIMLLLFVIGAAGVGGYLYIKMKGVKPASKKNQPDPDADYHDEDEDTLQLPEDDGDEDEEVDVNEDYEAESDDEPVMSLKLEKIAAEREKARRKRDEWEERRKEWDRKYHEQENSEICEMVHAQSLTPEQLAVIIQLAQAAVPNPENLKLDEKETEDMEMAGKKNPNLGDKLRQEREGAENTLRDSRSKTADSSTGDSSKKKAEHRRQIRHEADLAKMCSKKLKSEQEVKAKKNEAASGKKGGKPKKPGNLAADAISAKAHQSVRNADQDNNSGVEAAHFSEGSAEGAARAGSRFQYGRKLRQYKKLERLEKKADKDAVDSIFAERMKSDPQAGSNFFSRWRQKQAIKKEYAAAKAGAAAAENTAAGTAKAAQGTASMTEKAFQFVQSHSHIIIGIAAVGLLVLVIAGSVSSCSVLINGGGNVVLGTSYTAEDEDLKGVETDYTKLEDKLRKQIDRIETDHPGYDEYRYNLAEIGHNPYELASLLTVEFENYTRSQVQARLQSIFEAQYELKLEEKVEIRTRKETRVGYRYNPITGTGHTYTYQVTVQYEYKILNVTLLNRGVDYVARNSGLTDDQLQRYEVTLECRGNRDDLFAGIAFATPDGAGSSGEYQDYDIPGEALTDEKFRKMITEAEKYLGYPYVWGGSSPSTSFDCSGFVSWVINHCGNGWNVGRQTANGLMGKCDIIPKSEAKPGDLIFFQKTYNTSGASHVGIYVGNGMMIHCGSPISYASIETSYWRQHYYCMGRIRMFKILEKLTAKNKKQDDIRMPSHLSAAEQKQVQTVIDRARGDSTVPHSAQDSIPFQRMFPDGICRVTDNYYTKTIQFQDINYQLAQQEDQTAIFEEWCSFLNFFDSSIRFELSFMNMATDASNFEKMVRIPYQKDHFNPVRTEYSTMLRRQLAQGNNGLTKTKYLTFGIEAESMKQAKPRLIHIEIDLMNNFKRLGVRAKLLNGKERLHLMHDMFHMGDHDRFNFDWKWLPESGLSVKDFIAPTGFAFPKNRIFQMGGMYGSMSYLQITASDLSDQLLKDFLDMESSQIVTMHIQSVDQNKAIKSIKHTITELDRSKIEEQKKAVRSGYDMDIIPSDLATYGKDAKALLKELQSQNERMFLLTFLVMNTGETEQELETNVFQASSIAQKYNCNLRRLDFQQEQGLMSCLPLAQNLIEIQRSMTTSSTAIFVPFTTQELFQTGKEALYYGLNALSNNLIMVDRKKLKNPNGLILGTPGSGKSFSAKREIANAFLVTDDDVIVCDPEAEYTALVKKFEGQVIKISPSSTQYINPMDINANYSEEDNPIALKADFILSLCELIVGGKEGLQPVEKTVIDRCVHQIYQTYFENPVPENMPVLQDLYEALLRQDEKEAHHVATALEIYVTGSLNLFNHRTNVDINNRLVCYDIKELGKQLKKIGMLVVQDQVWGRVTANRNAGKATRYYMDEFHLLLKEEQTAAYSVEIWKRFRKWGGIPTGITQNVKDLLSSREVTNIFENSDFIYMLNQAAGDRQILADQLNISPHQLSYVTHSGEGEGLLFYGNVILPFVDRFPTDLELYRIMTTKLTEVQEAKEAMASYISVPRDLSKVKTKVFMNLTKRQILCFGAGALIGVPVFFLLKSSGNLSLAALGMMAVMLPLFFLAMYEKDGQPLEVVAKHFYEAKFKRPKTRPYKTKNYYALLVQQADVEMEVNRIVQNSRKADSEEMQSILEQITDWLKSMIISGIMGNLSGMFDSVNQQVGQIAGDVGTTPANFSPAVFSMIRNISESVILPIAGMVLTFIACYELIQMLIEHNNLANFETWTFFKWVFKTFLAVTLISNTFNITMAVFDVAQQVISRSGGLISGSTSVSDATLTAMQATLEGMDLGPLLGLYLQTFVVQVTMLALSAIIFVIVYGRMVEIYLMVSLAPIPFATFGNHEQSHTGQNYLRSLFALGFQGFLIMICVGIYAVLIQNLSFSDNIISSIWGVMGYTVLLAFTLFKTGSLAKSVFAAHMRKCRIGTAKFFTLLLLLYHTLIKSQGMKQLMAGGGVALIGTTLVPLLSDLFGMKKRFLKIVIGIVLVCILFVGFLYANNNIGMTSTNLETDIRSSQKIKDDWTLDGSVSNTMAAYISYSQDMSDHTFSVYVNRPGLSFGYFFRGGGTLSGIQRGIVEFTVEGYNERAFISMNQQQVQQLEIDDGNTIQVVDIDRNKPFAIVLPINAGNITFYDVNRNTVEYWNNPLMKRALLFIFMTVCVLGMSACSSKDAMPETSDSASNPVQNTDISNLNGGKIWSEQDIVSMFSLVQETDWEYIDCVLIPDHASDRVGAVLFRNDKEQTSNVAFFDADGYFQQYGTYARMSDEPDFQYLGGGAVTFRLETEDGIIYNYTITISIDDSNVNFKAEDDLPKMFFHRFGGVPQSIAVCIFLWGIRWEQDFIVDDTTLFRVVLHLLVIFTEQFFATLVSSGGNRRLPLAALNNRDFVVWTGHFVSLLSLIGGRGGVLPPHFGQKKAGDLFQISCSVCRYVGGGYLIVKVRGKLTRCEADKLEFILANHLPLMHISYQPLWNTLKERGMRKEDLRLAAGLTTNMIANMGKGKNISMETLVRICEALNCGIMNVIKLEQDNIMKKFSKRLFTSLVAFCMLFSVSAVPAFAAETTTEITDTQQPVVIGEYDGYLTDVMISDGVTKRAVANVRINSYATYDEDDGIQVHVKLYVPWYESPKPEFTGMTGTVNVLMNKKSTNTAFAELADGEETIETDVDTGRTGNSGDKGTVSVSGVATANNALAGGGAFAISYPVTLPMDLTLSFEEKSFILTDNTHKQEWTGTYSLEKIDNSSSKLGLTFENLEEPVTGVYGTRVYSDDSESATITLQTDENILSFVGEDSMKTRISVQERLKDLRVERGLNLEELAQETGISKSALGSYENDNDEYKEINHGSLLKLADFYQVSVDYLLGLTNNRRYENTPIEELHLSDEVVELLKSERFNNRLLCEIISHEKFKELLADAEIYVDGIATMHFHDTNSSLAALRAMVLEEHPEAAADRAIKVLEACQIEEEDFFCHVTHKTWDVILHDIRKAHENDSESAPDTTPADELIREVQKAMQSPGDRVQQFTEIFCKAFRLKYKRLSQEERSLLKKLFKKSPLIKQSGMNFRRRPWKMPRMSKKRKLELSFFLNDRGRVAYNDLCRKCQHKCKQSFRAVVIDCPHYLSKRAKRKEKISMEFEFMSADTVLPPCMPLPAAMLRLPISSTAKVMYARLLNTTLTAGIEDSNGILFVRFPIMELAAALSRSPVTVKRSLKELEDIGLILRVRRGVGEPNRIYTLLPKGGLPMINEKLEKLNQEIAKGEARLRRAQHEEKILEHQVKQLTRKERTHRLCTRGAMLESFLLRPEVLTDEDVMDILKQAFSQSGMKEIVAESVKGRVAGESLTEMAYELENIVREWMDHLKGLNVEVKKMFGCYCLYCDGQAVGWIHNSVMSLREVGLDYLPKDIKRPTKEDKIQELVIPLDYANADWLPKAVQDTAAIRKRNGMGWWFATSFWAKEKQETVSDFLLGGAASGRRVFIFRWFISQTKMLCPHHDIKIVQRSNRQSAVAAAAYQSGERLFSEYDQKQKYYAEKRGIVHTEIMLPPHAPPEYADRNTLWNAAEAVEKQWNSQLARRIVLAIPREIPRSQHAGLIRDYCREFFVSKGMIADFAIHDKGDGNPHAHILLTIRAMDETGKWLPKSRKVYDLDENGERIRLPSGNWKSHKEDTVDWNDQKYGEIWRQGWAATANRYLEANDRPERLDLRSYERQGLDKIPTVHMGPAVSQMEKRGIQTNIGNLNRDITAANRLMQSIRQMVRHLKGWIADLKEKKATLLEALQEAKEPTLPELLGQYLDLRREERTGWTSKGQLKGTVNDFNKVMVAIRYLREKELSTVESLDAYLDTVSGQAVSIRAEMKPKEKRMKEVDTMLSHIANFEAHKPVHAEYAAIRFKKPKEQFAAAHRDELDAYNAAVRYFKVHLEGTKYSTKKLNEERTQLAGEVAEYKERLSAVQEDVKILRDVRHWLNQVLPSEQYRQTAEPGKKPSIQQAVKGRAQRIREEQAEKRQQSRTEKKQDMELMNVFEAVKQFVTTRQAAEHFGIRVGRNGMCVCPFHADKNPSMKVDRRFHCFGCQADGDVIDFVSRLEAVSPKEAALILAQAFSIPYEDKEPSSHRKPPQETPEQRFRRMERYCFRVLCDYRNLLRRWKRDYAPKTPDEDFHPLFVEALQKQDYVDYLLDVLLSPDMEERAAFIIDCGKEVSNLERRMAELAAGDTAGRRTDHARSTATPERMLESTEKGGVRNSIRNCLTVFQNDPLLSGAIAKNLLTERTDIIKPIGYHRTGTAITDTDMNYLLLYLEETYGLTSEKKIAAAIGIVANENGYHPIRDYLNGLTWDGTERIRTCLHHFLGADSDQYTYEALRLFLLGAIHRAFHPGCKFEVMLCLVGGQGAGKSTFFRLLAVKDEWFSDDLRKLDDDNVYRKLQGHWIIEMSEMIATANAKSIEEIKSFLSRQKEVYKIPYETHPEDRLRQCVFGGTSNALDFLPLDRSGNRRFLPVMVYPEQAEVHILDDEAASRAYMEQLWAEAMTIYRSGDFKLSFSPEMARYLKEHQRDFMPEDTKAGMIQAYLDRYTGSMVCSKQLFREALNHPFDEPKQWEIREVNDIMNHCVTGWHYFSNPRMFPEYGRQKGWEREAPATDTSNGAEKIPEGFVEVTEQMELPFMAKTKTEIHVTTVFDGELDAADVFVSLIAQKYGQNTGKDNLAKTQDLGYNKDEVQKNRVPSGLCGMMNGYEYTGMDAILAGSFRAAIYCRLSKDDDLDGESASIANQRDMLESYCEKQGWEVVAVYQDDGYTGLNMERPDLKRMLKAIERRQINLVITKDLSRLGRNYLQTGTLIEDFFPRHGVRYIAMNDGIDTMRDNNDIAPFKNILNEMYSKDISKKVHSSYLLKAQQGQFTGCVAPFGYRKDPEDKNHLLVDEETAPIVRQIFLWALEGHGPNFIRRRLEEQKVPCPTWWNRERGFRNVRTKWEKKDPENGRYMWDFSVIKDILMNPVYTGAIASQKKDYRFKIGTIGEKKPQDWIVVEERHEPLIDSKSFAIVQDKLKSRQRPRQDGETSLFAGLIKCGECGKSLTIRTTHAKHPQQIYACKTYGAFGKNHCTQHRVEYDTLYHLVLNKIRECAKAALTDGEAIAGKLTNTCEAEQKGQREALERSLTKDEERIEVLEKMVLRLYEDMVAGRISEANFNLMLDKTQKEQAELKERVAQGRKKLADEMRLAMDAKQWVDAIQEYADITELDAATLNRLIKEIVVHEHIDSDKTRHISIEIHFNLKPIPEVEQVKGMQSIFDAITEWLKGLLVEGIMGNLGGLFTGVNEQVGEIAAQVGMTPAAWNAGVFSMIRQLSETVILPIAGLVLTFVMTYELIQMLIDHNNLHNFDTWIFFKWIFKTFVAVLILSNTFNIVMAVFDVSQQVIQQSAGLIQGSTAVTPDVLNDMQTQLEAMELGPLLGIFLQSFFVQFTMTALNIVIFVIVYGRMIEIYLMTSLAPIPFATSANREAGHMGHNYFKSLFAIGFQGMLIMVCMAIYAVLVQSIATSGDMMAAIWECVGYTVLLVFVLFKTGSLSKSIFGAHMYQEPNKSPWGAVQTCDTLCPGVFLVSTASHGGTMVSNEVAAFLSPAAKRCGFRRGGYLCFEEDTQEEVVLRELLDKKLWQIPERIKDKAAFEENINRSIKRYNPEYWRARQSGLEAAQSARKEAPARQTERMQTNAKTARPGAERKRPDRKPKKQAPARKTGPQTAQQTIPYREIFKDGICRVNDRLYTKSMEYEDINYQLAQADDQSAIFDGYCAFLNSFDSSLPFQLSFINHRSRPESKYKLNIPMKEDGYSDMRSEYVEMLEGQIAKSNNGIVRTKLLTFGVSADSLAAARPRLERVEADISSNFKKLGVQSRPLNGLERLEILHGQLHPGGTEPFRFTWDMIPKTGMGTKDFIAPTSFDFRQTRLFRMGSTWGAASYMQIMASELSDKLLAELLEVDAEMTITMHIQTVDQAKAIKTIKGKVSDIDKMKVEEQKKAVRSGYDMDILPPDLVTFSQDAKNLLNDLQSRNERMFLLTFLVVNTAATRRELDNDLFTVSGIMQKYNCLLKRLDFQQEQGLVSSLPLGYNGIEIQRGMTTSSTAIFVPFMTQELRMDGEAIYYGLNALSHNVIMANRKKLKNPNGLYLGVPGSGKSFSGKRELVNVFLATNDRIIILDPMGEYSPLVRQFGKDGLVVEIAPNSPHFINPMDLDLSMDDEVSPISLKCDFILSLMELIVGGKDGLQPVERTIIDRCARMVYRDLLNDPEHAPMPTLQDLYDLLCQQSEPEAKRLATALEIYVSGSLNLFNHKTNVDYKNARVLCFDLKKLGSGLRKIAMHILNDLSNNQVSYNFSCGIATWCYYDEFHVLLQDELTSSYFVTIWKMLRKKGCVPSALTQNVKDLLASRQIENIFENSDFMVLLSQAQGDRQILAKQLGISPHQLSYVTHSNPGEGLLFFGNVTIPFVDRFPKNTKLYSIMTTRPEEKEAQNEMSKDASGQVDPKKTNGEKRVKRGRLHFTEEEVTRQAGEQASGQVGPKSQSTGKFRQDGEREKPSSRLRQEDKAREDTVCEEQAAHKDQKDKREKKKERAEAKAEHSAVRLEMAKEKLSRQEPPKPPSLPKQAVMVAGAGVWAYGHRKIHEVEHENVGVEGAHKTELLAEAGVHKATRYTKRRIREHPARQVEKWEHKTMKANANLHYQQMAKEHPELQSSFLSRMAQKWKIKREYAKQAREAARQTAKAAGAAATTTEKAAAYAAQFVRRHKGGAVIILLLFCLFLILNSVFSALPSLGTGMMNAVVGTSYTAEDEDILGANEDYTALENELREKIANIERTHPGYDEYRYQVDELGHNPYELTSYLIAKLRTYTRENVQGELRALFEAQYKLTLTEEVEIRYRTETDTWTDEDGTTHTDTYEVPYEYYILHVRLQNKTLPMVVGSLMDAEQKEIYDITLELKGNKPYLWDDIYTSGGGSYDPGSYYTIPGEALSDPAFAALISEAEKYLGWPYVWGGSSPSTSFDCSGFVCWVYTASGVHSLPRTTATGIFNQCSYVSPADAKPGDLIFFTKTYACDGPVSHVGIYVGGGMMIHAGDPIKYASINTSYWQEHFYAFGRLNMTKLEKIDKELSKAREKAAEWQTKIRDLEKQRQEEENSMIVQAVRSLKLTPAELAEFFSNPVITASGQLGPKPDEAKEDTEHEEMKNKFFRRAAVLTAALFSFTCMSATAYAQSNEPVAETEPPAAEETTTKPFTTDGTGTVVDNATDEDGKEFFTITTPSENVFYLVIDRQRTENNVYFLNAVTEKDLLALAEADPEPEVTEPVVQPEPAPEPVPEPEPEPEKDTAFPVGNLLMAAAVALVGGGAAYYFKVYRPKHEAAGLDEDDYDYDEADPYGDMETEEETEDEEMNFTNSPYEKMMKEIPRPGRGGADRCAGCRHLKECGNRKDRCRKKFRPSGQVGPKSMCRELTRDERKGIRKLVTEMCANYNREYGCLPLDCECYMLGKCWTGAYCRYFREAVLPLDPLLVASICEDGPAPDTRLCSICGRPFLPEGRQAYCSEACKAEGNRRRSRDRMRKKRDKNKMKSVTFDNSRGFALGSDEAAPSPFVTWQFTETENGQKDYYWGHYHSSGQTAEKDFAKRVADYKELFGVHERTGGHEQAEYYRYYSTQRPVDLGTFPKPSGNAPVEIINFDERRMVEGGTMRAWGELSYLKPLTEKQMEDYELRPAPGNPDRAARPSITAQLKEAARRAEPPKEPDKAKHNKSHEDRMNEKDNHLLTVELSEEQNGNMLDGILNNLPPSPLPKGPEKKELDKVKEPPAHKRSREREERMVTADELAQIQRRMAEAGITNAGAYMRKMALNGYILHVDLAPVKELVSLQRRCANNLNQVAVHANTFGVYPEEIAGLQRDYEKLWGQVSDVLMELSALVEKMKRVLALFLVLICMLSLVACDKATGSGEPVRSGDVSDMPEIDKNVFGEKEQTQQAIIESISGTITRIDEDKIYDLTEEEVKTIADIIENGTWHTEGTAECANDCKLIIDERTYYYHSECGTFNDKANNQNLPVTAEEKESINVILAQYITLGLEMRLILKLIAAPLILFLTVLVAVLLFLFSLSSFLLTAASVIMALLGVGLFFISYPVGGVIYLVIAFLLSPYGLQAVAGAVITGLDSLNLSLRQFITSMAKASYKAMTGREQKKGEDVLCYQIRQSFYPGEITPEEANRVSYELAMRWTKGRHAFIVTTHTDKEHIHSHIYYNSTTLDCSRKFRNFWGSSFALRRLSDRLCLENGLSIVENPKPRSKGKFRNYGEWLAGRKRPLTYQDRLRAAIDTALAKRPADFPEFLSLMEQAGYEVKQRRGAVSFRAPGQERFTRLRSDTLGDGYGEADIRAVLSGSRQRPGQSRQKVSLAIDIQSRLQGKGPGYERWAKVFNLKQMAASLAYLQDNGLTDYEQLEQRATAATERFHKLSDQIKSTEAALHTNMELKAATVQYAKTRPVFEKYKASKYSKKFLAEHEADIELYRAACADFKRILDGGKLPKIDTLKEEGRKLGEQKKKLYAEYRKAKADMQEVTTIKANIDYLLGYSEPGRKKEQERMRMYQDTRRLDFHALGREIKRKREAKGWTQEYLAQLVDRTPRSIMYFENRGQHPSLNTFYQIVTLLDISVDQFFYPDRQNGESDCRQHIDRLLNTMDEKELTVMEATAEGLQKARETEVKMQRILVVEDDFDIQELLQNFLQEAGYEVAVANDGVEALSLFAGERYDLIVLDIMLPKIDGYGVCELIRKQSDVPIIMLTALSGEEDQIKGLDLQVDDYITKPFSMPVLLRKIAAVLRRSNRGTDEKYQIITYGNLRLNCDGYTATVDGANFELTQKEFEILRELLTHQGRILTRQNLLDKLWRYDFYGDERVVDTHIKNLRKKLGIDFIQTIRGVGYKVDKENMIKRIKGSLFAKVFILTVAVLLCVSFLVYGVLAWYMPQTYSNNLNAALDEQTSDFIYELEHIRMQDSGGLFDQFLQNTTISMVELYTADGVLVETPSNQNSFNDGITGEALGGASYESAPIISNSYYFSFADDNSQYILTVYGEASQIAELRQSFVSVLPILFCVILLVSLATAWVYSRIITNPVLKISRISKEMSDMKLEWQLEERRSDELGVLENSLNTLSRKLSATLEELQSANLQLQKDIEHQKVLERAQQDFFSSASHELKTPITIIKGQLEGMLLGIGAYKDHEKYLARSLEVAATLETMVQEILTISRLETNVDFKMEHFDCAPMIHGYLREIDDLVATKELQIHLAIQSPAFINGNKLLIEKVFSNLISNAVKYSPHGASVDIILQNTNGRFLFSVENTGTHIPEDDISKLFDAFYRMEQSRSRRTGGSGLGLYMVQRILQQHNSYCEACNTENGIKFFFTIMKRMALCAASMLLLGCLAGCSTTPQNSQEQGNPVIKEEISQPLGGSEALGNSEDSSALSAAGKEKMFAPYEQYGMTYDAVKDELTYNGNLVRWFEDYYPIGNNETAGIDFLNENGTVDVYAVRDLESFSKAADGSVDPGGKLIGLKEFTQQEFDARDIEALKNSTSVAMAGTPLEDSETAKLVAEYEAFGVTYDAEKDQWYFNGEEVRYFRDVLTSNGESLTSGKFRGEMRTLGSGVGTIDIYTVRDYGHLNSEHHGTLTGIEKYSQEEFDEHTQAGISGNQPIGNASHNMKEINLRDFYPWYKEDVIIEVTEEVAEELLAGQRYIKASRRRVYRNKAHYSLDAEDGIEYSACFSNPSPQELIERMERFEYLCHALNSLPDAQGQRVFEHYLLGHSVKAIAAAEGVTEQAITAAIRRGLENMKKYLKNVLMPQVGTSYPHGHDLQRAARDKLAAYPLQLAAQSGGSAGGKLSLSCDRPNIQGQHSQLSMKGANKTMGEEWSNNACRGYVIKAMENCGFKSKDIRQVLTELYEVFDFCAVEEAAHYYENWQSMVQSVTYQSETKTVPFQGKTIVLESLTPVLSPKEKEKRKKEIERCLYEVFSKYRVAGDKRRMNIREDVIYARQSVDRKDSISIESQIDFCKYELKGGSCRVFKDKGYSGKNTDRPEFQKLLGEIRKGKVRRVVVYKLDRISRSILDFANMMELFQEYDVEFVSSTEKFDTSTPMGRAMLNICIVFAQLERETIQKRVTDAYYSRCLKGFHMSGQAPYGFELEPTVVEGIRTKMMAADPVAANHVRLMFEMYAEPETSFGDITRYFEEQGIKIYGKSLTRPFLSQLLRNPVYAQADLEMYEFFKSQGAVVVNDAADFAGTNGCYLYQGRDVKEDKDKSLKDQILVIAPHEGFVPSDIWLRCRKKLMTNITFQNGRKARNTWLAGKIKCGKCGYALKTTHNPSGYEYLRCSKRADHKGCPGCGTLRKNEFEQFIFTAMGEKFREFKLLRGGEEKANPKITAYQVELAQVEAEIEKLLDTLTGANATLLAYANKKIEDLDNRRKTLSKAIADLSVETLSSQQIELLSGYLDDWENISFEDKRKAADGLISSISATSDYVKIEWKIMENQTKTKLTLNPEEEKQSNILLEGAPVRQTVQPIVQTQTEYNAGSIDESMLSNDEKEMVAQFANEIDISNAKQVIQYGSSAQKSISDFSVNILGKVKTSELGDVGDALKELTVALDATTEPEKKGILGIFQKAKRGVDSIKANYAKAETNVSRIEKDLEKHQVVLTQDVEMFEQMYDLNLQYYRELTMYIIAGKKALDKARGEQLEALKVKAETSQMQEDVENYNKYVNLCNRFEKKLHDLELTRVIAMQVAPQIRLLQDNDQEMLEKIQSSLVNTIPLWRHQMVLALGIEHTQRALSAQNMITEKTNELLTRNAETLKMATVETAKEAERSVVDIATLKRCNQQLISSISEVVKIHEQGAKRRQDAETELVKVEQELKQALLEAGSKMDLNSTHSCDFSYHNITRSQISIDKYNGESKRINIPEKISGQEVVEIGEKAFSNNLIIEHIQLPDSILRINDFAFFGCRNLRKVKFGLGIRKIGDNAFAECESLQDIQIRSEMDCIGANAFTLSSIESVEINAIEDLREESFSLCSRLTSFSVKKVDRIPENCFSHDIYLSSVRMECKTEVADSAFADCRRLSDIEYGQWNFSDTEDIYISDAQMRKMRRPFFRIKVILKNEPRLESEIVMEKAKRLYEYIAEHSDLQKEISNILPDDIISNILNGSLPVFPHEDLGIIVDENELIHYMNHAVLYKEVGDGQYISIKGKLYLFSNKIGFYGGSDIYEILLDDIAAIMEFEGSPIILEVLTNGENLYISTPNTEVLFKVLHTIESSKSEDDMKYMKIETTIEKIIEGADLDSYIFYFEDVQHSQINEDMEKQIGILIEKLHKLSTALEKYPDKVEGTHRFSNYYLPETLRLIFAHQQYLTAGVSKEQIDKVYTKVMESIDTVIAAVERKIDSIYQVATMDTIAKANALQKIMGQDGYVKGEGPLKHMLVDLLDQSIIAMKEIYELEKSSNDVQKQEKNDKIFSNVVSENHLMVNAVTNSMSQLGFVISQETRGRDIGLLKSSSDAVSRGLIQESTANYLQKEVFTIKKAILQEWSNYYHRVADPKINMLQTIKGIAPEREKVDYAINKIKLGASWDFKQDNLDKMEKGLQEADEIINSLGFGEDGAEILAFLKKVASGKASVHDLTPDILNWLIENNMTSKLAVSFRMNSEIAKSRIGEVIRIDTVTSTQADFLATHVPVQNIHIRKKWDSKTDKIMSEEKVFNKYVLNTENEHQFIIVIGSSGAGKSHLIRWFAARLEQAAPENEVVLFVRRSDNSLKGTIKQLLELPEVANIPNKAVYDRLVRATSTIDNKKLKDMIYQNFIVEIKNDENDEIISNNEKKRLVELLQYEQFQLNLMKEEGAIDRIYQKVAENETGDSRDVMALFETSDFEVDVNFCDDMFTNGAAKNAMKMANAILADDEMPERLADYMNTLVNKVIQTCAGLEPGDFEQVFVEIRKEIKRQGKNLTLLIEDVTAFTGVNVALLNVLTTEHTGMYESQELCRISSIVGTTEKYFNVNFMDNHKDRVTQFFVIPNDVFGEDQNSLYEFVGRYLNAMSLRGDILDDWAKNGASMKEYPIHKGEEKSLWDTVEIAKGKELSLFPFTKKAITNLYMCILQPDYRTPRYLLRDVIERAMRNYLFKKESFPEFAIERINDIPFESLYVSTYIHQQVEESQADRVERFIRVWGNASDLEYEESGIKYLGGMPIGFFDDLGIPTFTGRKGDKPVKASVDPVKQLSDGSDITQPPEHIVPKVDPAMADFLLGQRTLQIWIDGGELNVGTTTKDVVNITKARDEINKRFLISAINWQIEGVSLDNLNRVKDTKDFIGFERQKRGAKNALTILPADRETQGVLEAFLAYVTLGNGSWNFDNSAMMVYRVQTWVEKWKKTIIQTVNVFDNQPVDYQDCAIATEMIREIMQGVFTGTKVEGIPTTNLMAKNLKKTVQNSHCTEWNSLVNMLLNNDEKVKDVITQYYNIIQGNLKSSQVFIRATEFNSDVRKVQKAKLLIPDEQILLNDPIPQRRELREIYEKIYTRIPKVAEAEKEKANRLLEQIGTYLDYKDIDDEDIEDLIDKIKDFYETASNSLVNIHGNIQVLDGIKKDAKTISVAFSEVEKGIASTDDLDTLLMFSKDPLSKIERILSTLQAVQKDIEYVARDVEKRRGNIFVDNGGDLSTRYAESRNKIESDSKTVMDWKVMMFEDRMKTSAIPERVYALCQAIKSRTMKESDLRELLEPSDLGGTTKYFGMVRDAARQLGLISVKEGDISLAIDSKYVSSYDSMREYIVGNIDTISEGLFFAVSKEYISMNEQVFKFKGVSEAALVEHMSKVIGKPVYEDDMRAWRFWATYLGLGNLHDMLLLPNMYTYLKAVLAVCNIKKGEEYTFTDFVAAIKPYAEIGLSDIDGNKKINLAMSSGLRALHDERIIQLSHKLDSGDMWFLYEAELHPIKSTVTHVTVRRMIKEQIQECIQKILDNELGGISTNNCPRGGIEKYRYMTAYRLSKYVNFYRTRRISLDDFLISLRNYLLVFQTAVRLPIDIDITDNKYGLRIDSEGLCYATLNLPDYLNIDIIKQGFMVDYVEPEKDERYFLGVTPNIYRLTGFQRFKSIRQKLAVNGALNMPEGYTALVSLPTGGGKSLITQAMAYQKNDGLTITVVPTVSLAMDQVRVARDNIRVASKAEIACYYSDLASEEKRSIIDRIKNRKLRLLFISPEALIKNEVFKQVIETANDAGYLRNLIIDEAHIVIEWGNFFRVDYQCLEPWRNNLYEKNSKLKTVLLSATYERTTVKILQSMFATGDKWIEIRCDALRREPRFELVSATSYRDKNEKTRELLRCLPRPMVVYVMRPDQAEKVKEMAADIGITNVETFTGKTKSDERSRIIEEWSENKFDIIIATSAFGVGVDKSDVRTVLHLYVPDNPNAYYQELGRGGRDGLPCLSVMCVYPEEDLESAFVMTDKVLGSEKILGRWESMLNSHTSTRGIDSYTLDTSVKPNYNSVDYAEDTSTVDQKWNIYVILLLRRYNLIKILDMVVDPHTQVYFIRISILDKRLLQTSEDTKRLIEDVRTKEWNKNERAFKTMSRSVKLGKRMCWSEMFFNSTYSRVSEYCAGCDNHKNIVESDPNRFELVKKIPAPTRKFSVELNNMFANSNEAILFADSDNTELIGNVINRGFSTVIINDDDQSSYFNLLNSISEWTDVNLLGMNEFVRLVDHGDYYFFAGDAVVLYGNKYSGIYKKISRLRKSLQTGEIRLLHVFKEDIFCNEIGKTVSSIVDGPVLEEYLIERMMERGMYIRCPIAEFDDPRNFIVGRIIQVDDFTEHVTVAFLDPFGFRNYYENIPEKAELPYDYVKRCTLHRESYVIYRGNRYKILSAFKEDEWYYYYLKEEFTDKVIKVREDVIDAPFNGGRISPAEQLRSYEFQNPAWYFGRNVVSKTVKVLDNSVFGFKELAGCKIFLKEHQLRTIMRCLQEKNCRVMLADEVGMGKTIEAASVLKVYTLHNSNKRVLIAVPRPLVAQWRAELLIKFEITPGNNVNDNYVELIAEEDIEKYINSRWDFVIADEAHKLLANKRLYTYFHSLSKHSENILLLSATPVQQKKEAYLALLQLIMPDKYDHFSIEDFQTLVEKQKNITKSTYLVLQDFDDYIDNIADTLEDGENPLENDDCTDLFDDIQNGLRRISRLIEDEGFDKVLSEINLESEDYGKGAIQEALLYVCENYQLEKNIIRNRRRYMEEELPHRTVREIEYELNPDKNTYEHTTYEAIVDWISGQEISAQDFEIHYIPLLTAFFSSSWAFNKEIEQQRKSGLAINQDVEENAKEWQSAEEWMLEELDNVLAEPYNYSSRILSIVDFIDQEICEEKVVIFTNYAETFEKYGQVLRAYFGEEKIALFNKNMNEEELELSIYRFQNDDECKILLCDETGGEGRNLQGADFVIHIDLPWDANAIEQRIGRLDRLGRPADKDVCSVVTYAKETLEEELYNFWNKGLNIFTQSLSGLEIIMNEINESIIHAVTSDFRYGISNAINEIIDSSQRMEKEVREEQHFDSAAFIYATLNQELKRLLHYYTSNENELFANTMMGWASLAGLKGQFNKNGVVRFNENSFSIKSAENSMLIPPNWMEYVNRTSNAFSRRVRELYEERTGNKTSTGSREIVGTFNRELSIENDYLHFFAPGDEVFDCIVDNAMNSYKGTCTAFALEADFDWRGIVYTWNLYPNEQLLLENGIPLTAIRQYKSYVSADQVITPISTQKYEHVPTDKVLKIIDAVSRESTSDIRREVVHLGRRSVKTDGLHIKERYGCSNVDWFRQAYPEDKWINFVSASMKAAKNQVKEKMKASSNLKQAAASIEQTLNAEVAQAKFFGVDAGEIEQKKQVYQTVLEALRTTRVELEAAAFVMVRKTHDMSLSIYTYSNPYEINNEPYWDSIRNCAHFCVSQTMVNGLSAVYDELDNGQLATVEELVEALYPRWFDTKTYIEQYTILTNTLDKVTPNIEPERWKKIKQSLRFNKSALLDSIRLMVEMGLLLKNIKIKKITEEQMYLVAAYNAILRGENAEIFALKKNFSEGEIDNAVKTALVAKDKRRGKEVKSIESVDCNTVVIHGIHQFTPTILSMIEEVSKYKRVVLLFNYQQQYNEIYQTWLDVYSCFDLNIKSQFNNEFKPTTLLQPSYEGNMLADQIGRLANGTLIEKSKDINNVKVVEFDNITEFSAYVARIYEEAAKDFHADEHKNGSVLSYMKEQFYSANNSVNDILKVYFPEQFGERHFLAYPIGHFFVAVTNMWDSENGGIRIENMNDIAECLYSGALYEKKVGSLITTFNQTKNYFSRATKLKGDSETDGVIDLLIKLKKQMSKLNKGKIEYTEQLERLSYFNVQSDEIDELIESLEALNTITKLFYEDFENENNNFKHFYEKLKDFVETQILPTADAETEFQDILLRLLARLEEVEKIESTSTFDCLKDTMAYYLKQESQKGESANWIVRDFQQIDGDILKSSTQDPDTIYHFACVSDSDMNVKREDQFPWPLTIEFFERAYEPLDWKYQVYVKSRKEFKHFKRYALIYGLEFNRCKFKLSFIKNDDNKENELYYILKLLGVKTEKNIHDTTEVHERQNITFDLGKNTNNFADLDGFRRRICGYRFALESLIENGTKYQDRFLQTKYLEIILANNVRRKLEGQIATEAIMNETLDDSAERLRRYFRFLNESEITDIKSNAKSAIIHQALQDGKIKQFPKVTDIDFEMMRKKEEFIYLHLENENQENVLLGKFNDLTTAEKKQFLPDNLKNASYDKEANIWCQWCAVREKCLENYKSLVEIMALMMDNKPTEYKGEALVWEKLSSLLPNDVVVYNHREVVDDREFDFALLIKNVGIMVIEVKGWQSQYIFDVKGPDEIVIQGESQIYGSPEKQARGYRFDWLNFLNDQFAISPVVLSMVCYPFISEKEYKDVRLDIVSSRDFTIFSDDLNSATKLGQKISNAFVKKKPLNSTPFDEKAMAIVRQHFEPSYKAKDDQIVEVSDAYSLLKVFNKELTEKDSDELIEMYFAGTKIVVFVKSEIDLSSVCNKLEAGFNARGIISDKGNVRLAEIDERNDFSGVFGSFRIFNFEIYTHNLDLNNDEIIVEGQYTEQQKLILEEIANSTSWNFDQYKVEHAMGDKNVLVQAGAGTGKTYSMVSRIAYLCMSRKRFINNLVDEIAMVTFTNEAADNMKLRLKQYFMNCYILTKNKKVLHEIEAVDLMQISTIHKFAKAVLQSNAMEYGLGADFAISSSEYAKEQIYEKYLNDFLVEKQKEDANFAQQLRMPVHKFRKLLMHFSQQLYNKSYGIKELKAENLGTFEEWPFFNDVIMKVMIPAEKEYEEQIFSKNKIDLKESMLLLNDAVNGAFKEKCGLKYKYLFIDEFQDTDDVQIDSFLKLQNVIKDTKLFVVGDLKQSIYRFRGATISAFDLIRTDKEKWEEFSLTINYRTDKRLLNKFDAVFSKMGSKGYLPFHKGKDSLTSSVETYLSEHELVTQLEYNSDEQRMEQLFAEIERQKDIIKYLSKHHKLSSKDKIIAILVRDNWQIHNILEEAKVRGEFIETHVGGDLYQLIPALDLYKLVIALLNPRDPVNLFNLIDSNYVGIQLDIQGLHGLGTEEQVKKLTDVLNQYFTIVMNKTWEKIIVDAKVQPILMLLRSIYEGCQPWYQYSDTDSEQRFYKANYELVLEKIIKTYSVDFLTLNVIEHSMHINIMTKQEELARNIEVEMDDMRVICTTVHKAKGLEYGCVIMPYMGMDIASMKKADLDVYVENEKLAYGIRIGDEPNKKYNSNYDVSQEQNERINEESRVLYVALTRAIRNVVWMKDIKSKSKISWQNLMEVMIYLDNSATSPIDEEVRDAMLPYLSEEFGNPSSKYYCKATNARDAVENAREKVGKLLGAEPEEIIFTAGATESSNFIIKGYLDYRKFYGDGKNHVITSLVEHKATLNTCKYLNGELYSNNDPTTSLFGGKKKVDRGYEASFVGVTPDGEINVEEISSFIKENTALVSMLYVNNEIGTISDVEAVAAICKKNNIALHADLTQALGKIKIDVKKMGIDYASCSAHKIYGPKGIGAAFMKSDAYGIAPITAFMHGGEQEFGFRAGTHAVHNIVGFGKAAEIALRDLKKNDEYIKHLDDMLIGGIRTIDGIHTTVDSSKRIPGIVSLVVEKSDFHNERFIKKISDEVALSTGSACSAGEPSYVIQALGLADKVTKVLRVSINKYTTEKDIEEFIKLLKTESMFESLQLKQENVLMYMTKMKISELEKYSVVKRYNATNETDYQRPPMPAHYRKIAKYFMTESKPILPSAIIAAMGKDDYEYDGTNLIIKNKIRIVDGQHRIEGMKCLKEGYSKNSIDRYKELNETFDLPVIIMVIEDPNDLIEIDAFINLNSKGKKVRTDLAVALKNKKTKSAMDNSECCEVDDDIKLAISMEVSNKLNGNPTSKWYGLIIQADEVGNRNEQPISIIAFSRSIRPIVDRYCELKLNNQLCAEKYEEIVDDICGVIENVWKCVEERWSECFNDDGSYNSSYNICKGIGVNTLFGVFSEVYDNNVTGYDNFKEILNKTEIDVKDWLVGGTFTGYASYQGFSLIKKLIKGQLSRNEFMGANRNEFIENASKILLSKSEEYKCIIDKIEHYLNELLEDVKGITISGRSKDANNIAEKIYRKNYMMKYNDAAKFIEELPDGIGVRIICLLNQDEVKIYKHLIDRMPDERRIGNKSFRYRQDGNFFVCTENQPEKQKNNLDIYRMDCIWVENEKPVRVELQIKSLTNYFWGEIEHSLFYKNYDFTIGNSFYSGLMKNIHNELQNIDVEMASLENHMKKSEHNQILEIRQISASMISQKFSVPIQKIVGCKIDLRESFMLLTDMHFGISSNVKDNLEKFNRLIDKLDKAKTDTMDEEYINLDKQNLDEREISEFGKGIANIIHTNIHNGDVFWQFLFLMYKNLFSDKEKNYSELLSEMSRSIRKLYIDIQDEADALSQYPEIDISGIVDNIFLRLAKDRNKISFFSLELELAKTKEILRNELACVQKKVENGIEPIDTDLFKENIELLELIIYVSTTYRIGRSLEDGQLIKLLELAEHKNDYSLELSEEVINNIKQRNCLNQEDLERIFLLRKEEAMIFRLKTSKRTQEIFEELENRTNYKPYTLVKHAIAWSILEKTSVADYKSDSDGLDLNRQTITGDNDTYFKVLIEQVEGRYLTDEEYFPQYVKAHIDRGSQLLLDMYNHAGNMDKYILQVLGEGDTVMKINKVKLHNFSSYEGNNEFDFEITDAGKNIVLIGGKNGAGKTSLFTAIKVALYGPLAYGYVGVNSHYISKIKDLINSKAFQQEVVESEVQLTLQLKIERDIRNYVITRKWDYTNQKLTEEYTVERDGKLLNDQELSYFENYLRSIIPPDLFEFFLFDGEEVGNIFSTSAYNTYVRNAVFTMCGMDVFEIIRKFIRGYVAKNNSNDDDEVYDTYESAKQQIETLETEKENLDIEVGNLTKELENIDIQLTELATAFKNAGGISRKEKKQLEDEYALAEKIKTESLTNIKLFVEGLMPFYILRDFADPIMAQLDFEEKGEIFYYVQSKLKRDAISDLLKGDVSDAKVDQLMDHLLDTFRPKGFREDMEMMFDLSKEDIGRVNGIVSSLDDFDVSAMVDLVNKRKAASERTAEINRILKKSMSEEDINEFAQRENEILKKKDDLSSILYDSQHRLEEIDRELQMQEQTRDKSMHILKSNAQNRHVYELSSGISSMMEQFLEEKTVSIRRKLEKAIVKKLKSIYRKNNLITHIEIGKNFDFNLYQDEEYNGKELLTLYKNLGDSEFTNLIGTKGEKRLVKMLEATSINVLKNKSESDFGQEPIRLYKKIELGRLSKGERQIFILALYWAIIEISGQNIPFIIDTPYARIDANHRREISEKFFPNISDQVIILSTDEEINEEYYKIVKPYVSKEYLLINDENENRTTIKNNYFFEVMANSYFNENTLEELIEEIKYVYKSDDRPWVIGYSGGKDSTTVVELVYKMLLGLDPDDRHKNVYIVSSDTLIENPLIKIYLSKMNDLLGQAADRDGLPIKSAMVTPPPNNSFWANVIGRGFPTPRMNGTFRWCTDRLKINPSGEYIQRVIDEEGKEVVVLLGVRKAESIARKRRIEGRELANRLLNRHETIQDAYVYNPIVELTTDDVWDVLLRCDGGRTPWGSDNSELVSLYADADSGECPFAGIHAGGQTQSCGNSRFGCWVCTVVKEDKSLNGFIKSGHRELIPLAEFRSWLMSIRDNEEYREKKRRNGTVYRDKQGNMGFGPFNWKARKLILRKLLETQQVMGYELITLDELKAIDEIWDQELDLSRRVLVELYEEITGKRLPWYDYKEPLIDNETVVELENLAQKNNVPEELIRNLLLSVYRNKNYSNQKILRDGIDRLLNQQWLHYEIIEEIENENQMEIGSRLSELRKKYGYTQKQLAEALNLSQQRVSNIERNTTAPDVEFLHGAADLYKISLDELIGRRTLITEESSYEQQILNVVETMDDTKKELSLRLLNEVAQQRGDKDGEMFVCKKCDKEYDESMRYSRDSRYCKKCGEERTQYLTYRRDTLASLRSMPLEAKIIQTKYLINQAVRTFGEDHCYISYSGGKDSTVLSHITKQLYPNILHLFANTTNEYPETLKHIQWEIKENHTNIMIVYPIDSKGEMWNFKKVVEHYGYPMFSKRVSNAIRTYQHAKTPRTKQNSIDYIERNFKKYQKYMELPISDKCCDKLKKEPLRRKAKELGMKCVILGILASESYQREKAWLEYGCNVFYQFKDNQCKPLSFWTDDDINEYIEKYNVKIPDLYNMGYTRNGCMFCGFGVHLEAPESNRYQKLKATHPKQYSYFIDNFGGMMLQFDIVVMYEMKPEYYIGIDMIDEEHKQLFKYADEAYELLLDEFTPDKYDRIDIILENLRNYTVKHFSDEEQYMESINYKKIFTQKVQHQEFIHKLDEFMEHHNDEVEDQDEQIMGILKYLTEWLVNHILYVDGQIPKGMKEELSIDIIGLAGAYSYALDCIEAELVNIKNKHGKRVAYISICMAEYWKIQGDELQDLAMCALLHDNALTQYISEELKKDSVVNCKKDLSEKKTNLHCIYGEKNITKIPFKTDVSNVILYHHEHADGTGPFQKKWNEIPLFARIIHLADTIDIIGNNTGSGNNSWNFICQYLLKNRDGLFDSECVNAFFHAFTHSESFICLRDNSFEMKLWEIIPRQKQVFDWKTCKNVADFFAKIVDYKSSFTSRHSIGVAEKAAFFAQYIGYDSINVQKIYLAGALHDIGKMAVGNEILEKPDKLTDDEFSKMKNHAGYTYLILSEVNDFEEIRDWAAFHHEKLNGKGYPFGKTAAELNEPERIMACIDIYQALTEDRPYKKGLSHEKTCEILDDMAQKGFVDSDISKKIRECFGGIMDRKAMYKLSYGLFILTAKEAEKDNGCSVGKDQFSEAMTSRRNTIQKDLVRNTVYEMRRHVTANEVYEFIKEAYPTIGKGTVYRNLDILVEEGALRKVEVPDGPNRFDFTLKNHYHVRCIKCGEVFDVDMDQIPDLLERIHNTHGIEFVDYDISFKGICPKCREKVNEEQHGMKIILSPAKKMIVDTDNLAPVELPVYIDKTAEVLNWMKSKSKEELKAIWKCNDKIAEQNFNRLENMDLYNRLTPAVLAYEGIAFQYMAPSVFEIQQFEYLKNHLRILSAFYGILKPMDGVTPYRLEMQAKVGIGDAKNLYEYWGELLYRSVIDDSRIIINLASKEYSKCIEKYLTSQDRYITIVFCELSGDKLVTKGTYAKMARGEMVRFIAENNIENPVEIQKFDRLGYSFRSDLSSDSEYVFEREIKMLEVGKKAPDFELPDQNGEMHKLSDYAGKKVILYFYPKDNTPGCTKQACGFSERYPQFTEKGTVILGVSKDSVASHKRFEEKYGLAFTLLADPDRKVIEAYDVWKEKKNYGKVSIGVVRTTYLIDEQGIIIKANDKVKAADDPENMLKELAMKAHKYWSIGAIVTMVGTFYTGYKGLKAAHKYFAFGSLICMIMAVYSGHKMISGNKRTRKQVENTKAEEMEMPISHRFHSXXXXILNTLCKYKNVEIIAGAVCVDHVHLSVAIPPKLSVSDFMGYLKGKSTLMLYDRHPELQSKWDKAAFWARGYYVETIGNITDEAVQKYIKEQAEELRKEDSRSTALMNHDIEKALDNLEKRAQDIQHYMNIMSKVKTVNVADDQDFQREFDFFYKVRRNAEWRKVFFEIFERKKKKNCSYKEIITELYEGTGQVEASFASKMLASIDENMPIWDSKVLDRIGIKSSNKRGQQKLEETIELYDVIVQWYSDLKANKASYNEYITSFDSRFPDYSSISDTKKIDFILWAMGEEEEDTIPSVYIQNMEALSDAAKIASRSIEAYPGVVSAVKQIADCMKQYQGISQTFMENARRISETIRPIFEYQQQIMESVRPALESLGKTIAAITATIPKIEIPESFFKTLGNLRYLYTLKSITWPLFLEDDEELKEIITGLCGDKKENYPLDELAASICNYYNSEKLDNIVDGWRKLLKDDSERLLLLEEAVNLHNSGCYYGATSIMMCQVDGLICDISNYTDENGLICSEDDEKEICELYQIDFQNHKKFAKTSEKHMILRLAAMTENAVFYWEAMTDYIYNVVLTSHGEEYRDHNPLRNKICHGDQLDFGTEEKSLKSIFVIDLLLNLKSEMQWLAEHKFDKMAKYAFNYDSGEYEYIERDGFSIDRGECVYNWDDSEYRREEEEEEERRREERRMWNEDMDEKEIKFIQDQIGYTFKNQELLVQAFTRRSYSMENGGQDNEVLEFIGDKALDFVVVKQLSEEFGHYSKKYQNWEKWGKTEETGTFISDLDEGELTEIKKQLVQKNTLADAIDNLGIAYYLIMGKGDVEKNIQDSLSVKEDLFEAILGAIALDSNWDIEALQDSMNVMLNPGELMFDEDVNYVAEIQAWSSANSGNIPLHCFYPTSMQGTWYMPRHHMCIYGKAEQDTHFACEVQIPGIDYHFVGYGRSKNLARMDASRLAYEYLKDEDMLFSIRDEIDDPNYNDSIGQLEILARRGYFSIPQYDFKETHDEDGNPVWNCKCSIKEKDTVTNGRSSSKKDAKKQAAYDMLTFVLEEKMKIMSRHFRAIAMKTVEEQYGTDRKQDTRLPIHRLMQKRLKLTESIVGLLTMIAGGGIIYYLVCKRWSDVFLMSLIFAAIKALLLAVITVQDWCDMLIEKIGALMRIKSMMKGMLAVVMAMSMAACSGAPAADQTSSESPSPAQTESTAATEQETIVTEVSAETQTQEETAKAPKYVFCLLVMVMNVNPITRLDYPDLDVIRVEDTYYMVSTTMHFMPGCEILQSFDLVHWEHVTYVYETLDHTDAQQLKSGQNIYGQGMWAASLRYHEGRFCICFVANDTRKTYLYTSEKIDGPWKKQLIEGFYHDGSLLFDEDGRNYIVYGNDEIWITELNEDLTAPKKDGLHRLLVSDHKNPELGYEGSHIQKINGYYYIFLIHSLRDRWMRTEACFYSDSLEGEFTGGDVLCDDRGYCGQGVAQGGIVDTPDGKWYAMLFQDFGAVGRIPILLPVTWKDHFPFFGQNGHVPEEIEVHSTRPGYIYQPLVGSDDFCNGLLPRWQFNHDPDPQYYHLDALQGTYTITTREVCTELTQAVNTLTQRMSYPSCAAEVTVDASALKEGDVAGLCALQSCYAAVGITKHHGKYEVLMLDKKEDGILDMTEGTIVESHQMDFRLEADFCNMKDEARCYYRVNKGDWLPIGTVHKLYFKLDHFTGCRFGLFCYAAEETGGSACFRDFKYYDVDEISMKVIIINGSARKGNTLTAIEAFVKGASEKNEIEIIEPDKLNIAPCKGCGACQCSKGCVDKDDTNPTIDKIAAADMILFATPVYWWGMSAQLKLIIDKCYCRGMQLKNKKVGTIVVGGSPVDSIQYELIDKQFDCMAKYLSWDLLFQKSYYATAKDELSKNQDAMKELEDIGKDLMLHWSYTPEQKEEVKKALAAGVPKATILTYFYPEVTVEKMSSYRKKQMNLDNLEIVKLTISILSIVATSIFSLVTIIITCHNANKQVKESEKALKQQEEQYKKEKLYDKEIIRIQKRPYLVVDKSSTCMCNGNSDHHMTIYFRNKGNGSAFKIEPVTQITASNGNTIFREEPIQDPIVMVNELCETKWKFDSPKRDFQFSITVKFEDMSAQLYQQTFILTLDSRLHIMVTNYAEPELVNKMAVERRKDNKNRVLKEGEYQRSSGTYEFKWRDKRGGRHSISAVTLEELRERELDVLRDVLDGVRVDKNNLTINDLYNSWVQLKRGLKDNTFSNYKYMYTMFVEPDFGKSRIVDLKRSDVRGFYNHLADERNVQVNTIDSIHTVLHQVLELGVEDDYLRYNPSDNALKELKKARNFEVEKRRALTVPEQELFEKFLSKQGQYHRWYPIFTIMLWTGMRVGEITGLRWCDIDLEEEVINVNHTLVYHCTRTEAGQIFAINTTKTKAGERTIPMLPIVKEAFIMEKEYQEECGIKSEAVVDGYRDFIFVNRFGNVQHQGTLNKALRRIIRDCNFEVLYKDHRDNAVILPKFSNHSLRHTFTTRMCEAGVNIKAMQDILGHADAETTMQIYAEATKDLKKSELINFEEYFDRLKDAQKKGEMMYICENVDKLESYRSRMKIENCYPEENELPLIYVESRGVKKIDLQANYGLPYYDEIDINLISETNTSCSRKIIYSNYERVLNSISYIVKNECRPISVLKDGDAYYIENGKHRYLAHIILGKNKIPVSIRERVSVCEENNGFIQYKRNLFSDDGKKISYPEKVIEFYEENKGIFSDIKRVEMQHTGEHKYKLLLEKSNQDVIEISNGISAGSNIRSSMVVMKLISKCGYDIDETYIKTHQEFVLEEKYDANNLKFNDILISDTILQNIKNNINMLEKPMGHSEKINKLHTFLCKYEAFNTCGTHMDIFHTGIIKFADYICYIISSEDKDCTGRIYSYIFFQENEELSNLKTKYIGKIKHEMIFNLQSKWDKAFWARGYYVETIGNITDEAIQKYIKEQAEESRKEDSRSTALGASSATGDYGASSATGDYGASSATGYKGASSATGYKGASSATGTCGASSATGYCGASSAEDKDAVAVAWGYKSKAKGVLGAFLVFADWEYTGSEDDTEYDRNNQSAWVLNGAKMVQVDGENIKPNTWYTIENGEIAEVSEMNYIKAKYPNQSRSYIFATSDDVKAGDMVLNAKCAKLTVTDETVDMKWVETYGADKVAVVKKCEEPESGGDDESMRVNPCRYCALSVNLNGKHCSRYSSEECAKCENIQKHREYLLSQRKFAEGEQITSIEELLKQEWVMWYHSTKHIEVFKNMQLNLVLKFLKNGAFKKAIRKESEEKMAENTAVAKAEEKKEEKTEVAHSNNKVTDYSLGIFGTSDNFIMAMQMAKALASSTIVPATFQKNDANCLIAIEQAQRLRVSPLMVMQNLYVIQGRPSWSSKFLIAAINNSGKFDMELQFEETKDKDGKPYSCLAWTTKNGRRVEGMTVDMEMAKAEGWIGKNGSKWKTMPQLMLRYRAASFFSSLNCPELTMGLYTKEEMQDNDFKEYPMEDLQEQVKRDISENANSEPFVVAESEAIETGSEVVESEPEKVAGEVVENDENVPDFMKDMRVISQDGTMDFPYDNALVSVYKGCINGRVYVRMQICGYDDSVDVADYSTEEKAKKAMEMLREEYQKYASQNYMKVFQFPAEEELEMEVISFLESVQKGMKDNIYKFCKDGRCSQCGNCCSNLLPMSRKEVAAIHRYVRKNHIKECKHLLPTANRTYDMTCPFLDTDKSCEKCIIYPVRPEICKQFICDNEQRAKHNRALLGQTRQIIDVRSEFYHRNGKMENRQKEKITKSRERVKKFGEVYTPGWMVQKMCNMLEDENGGAECWRGTVLEPACGTGNFLVEILKRKLSIGMTETEAAETLFGIDILADNIEESIQRLTDLAPTAESIFRKNIVQGNFLKPEGIWFLEDAEMREKAEDPYVSLGICSRCHKGILGTQYKMCAECREKKAKVEAKRLARETPEQAEARKERVRTRYYMNKSSGICVKCGKRNAVCGTVLCNRCLAKRRSCEKSTSQREYREDKGLCIICGRPAVSGRKHCEEHLKMLRKTVANAASHIDYTKHPWIIDNKHIFENMKLKALGSGSSGNCYILENESEALIIEAGLPFMEVKKALDFNVMKIKAVITTHFHTDHSLYSLQYVQAGIPVFEPCRPPIKDSEMRFRKGNFDIRAFENRDKSGRWLHNNGDGSECPCVGFYITHPEMGSLVYATDTEYVRWRFNGVNHIMVEANYDMQFVDRDEPNYEHRLRGHMSLDTALKFISTNDNPALRNVVLIHLSDKSGDPALFKQKTEETVKYGSDVYVAERGLEVDMNLYPFMNKVILMGRCTKDPEVRWSQGEKSTAIGRITLAVDRKFKQDGQPTADFINCLAFGKRAEFLEKYCKKGTKLVIEGSWQTGSYTNKDGNKVYTNECLIESCEFAESKQASQDNGSYKPQPMTDSDGFMTIPDGIEEELPFTMLLIEDKGQKEGQHILKNRYFDRNDIEVLRAPLPVGDYVIAEGTVLDVIRRKSARKMEVKKMDFIGSYKVAVDTKKDMQEITGNVCGKQHPRFRDECILAQNNNIALYVLVENMDGIKTIEDVFHWHNPRLERYNKIKYMHGIGKWLNVPLPKAPPTSGEVLGKAMLTMQLKYGVEFVFCRPEDAGSRVIELLKTEKMASKRMFRIDLVTSDAFLDMPLTAQGLFFHLCIRADDDGFVDCANKTVRECQASKEDLQILIDKHYVLTFPGSNVIVIKHWKLHNCIQKDRYKPTNYAEEKSMLYTKRNGAYTFDASKNFSGVNAIRSAGSSPGKEVEACIPSLAEVADYCRKRKNGVSAESFIDYYKSIGWKRNGEIITDWKAALRSWEKQEKESNPRSKNKFNNFHQRSYDYDELEKTLAETNVMEGRDKKMMEMGECEICNRYRHAKHKGEQLEILAELNDVPRHKIIGILLENGENVKLPIRTRGRKRNTDFTEKEYQKALLNRLDELDGQISDRENEFKDICTVLFGTRFDMRNKDEELRREGMAYALRIAKENGIDSLEEECRFRGATKLPLALPKNAIDECVSKIKLNTIDTVTILSAMVLHDEFDFGKSRIQRFVDRFNKKAECIMDDYATWEDQIQILKEECGLDFKIRRNDTDVKVRMKEKMRNYSGDALKRFREVPYQLRCGKEQGNDMIECMRTVARKPEFGRWIPVSERLPDPETEVLITARRKYKSGRCVDTITTALYEDGNISERDSCWNWVDIDGEYDEENDCYIVPEGWWENRHFNPDEVYNNLVDDEVIAWMPLPEPYRESEEKMGCEKECKLGKTYCCMECPSNDICREKRKNRKLSFEKAVKWIAVSIAVIAGIKMTGSAWCLWAFALPVMDLNFTADLKRATSDQIRIAIEKMQKNGGKNKTRIAACESELKRRDREHGKMGNRYLCRGKRIDNGEWVEGCYVLIDNHCYIYTGSLCNGGLYVVAERFEIQIDTLCQCTGYEGIYENDIFRYEDEDYVIKWSCDSLSWEAVSLFTDESVSLAEFNPDYIDVIGNEIDDPELLEMTENEAIEVLKDFGKQVSAKADGAYQSTIGKKACDVAIRSLKKVAREHKGMELTDYWWNAFRGSFETEDDVFDYIFDRVDTSDFEDSYIDAGGHGDCDELVKITASDKRNTMYDFMMAILDEVQKYRAIGTAEELQDMKSNYFEALSDWRQYRKIGTLEECRAAVEKQTAKKVMHNKKVNIYFCPICERKCNYMHSLYCSGCGQKLDWSDEEMSAVWFIILFIAWENGIEIDNMSFMMIAIFYVGDCILMQNRRANDGKIDMGRLIDADALKKDLKSVTLSNGTLVNTNAVLYLLEEYPTAYNPDKVVEQLEKKIQTHTRCIEYENKNGTITEEFQQRKAVEVLKDAIEIVKGGGIDGMAKAVLVIDMPERCTKCPLLLTIPQKGGLALCLARPTNGQEEYNPKNEKTWRPDWCPLRELPERSDHPEHCDNGRFDAGWNACLDEILKISIPVPELKAVERFKLLVDQTDKSKFELEKALSELTATYKRIIAENLGMINQIITNIKQDLSQILTPDQMEALSQSLNKHLPMLAGDKSVEENTKHDMLPLFIAAKRVEGCSEKSLRYYESTIRNMLEAINKPECQISTEDLRGYLDTYQRRGTVSKVTLDNVRRILSSFFAWLEDEDYIVKSPVRRIHKVKTGKTVKETYSDEALELMRDHCDNTRDLAMIDLLTSTGIRVGELVKLNRSDLDFENRECIVFGKGNKQRKVYFDARTKIHLQRYLSERTDGNESLFVSLLKPYERLQISGVEIRLRKIGRELNFNKVHPHKFRRTLATMAIDKGMPIEQVQQLLGHQSIDTTLQYAMVNQNNVKESHRKYIGMLSAVCNSQFMEQFGNLDSNTKHYPIKKLSEIATLEYRRTGSTRRYHPGYECKWATNTVVHILENREYTGCLVNFKTEKLSYKVKHSVENSPEKQVIFENHHEPIIDTQTWERVQELRKQRKRPNRYDEVGLFSGILFCADCGSVMYQQRYQTDKRKQDCYICGNYKKRTHDCTAHFIRTDLLTAGVLSNLRKVTSYAAKHEARFMKLLIEQNEDGGKRRNAAKKKELEAAEKRIAELSAIFKRLYEDSVTGRISDERFTELSADYEAEQRELKERAAAIQAELSKAQEATVNAEKFMNVVRRHTSFEELTPTLLREFVEKIVVHECSYDENKTRRQDIEIYYSFVGKVDLPEMPKALLDFLGYKFFFWSNENAEPPHIHVCKGQQTSSATKFWITADGIELAHNKSQIPQGDLKKIARYILENRAEILAAWFDYFNQLTVNNIVTTHSALLEKDGFDIVKVHFERPNPNGFDFLDLTLPGEIVHKSFGFSEDEILQLKKYAKNNSSLIWDFAQKGGGENAMRQADCIFCKIIAGEIPSNTIYEDDTFKVVLDASPASKGHALILPKKHYADIYDIDEEVAGKAMKLAKKLAGHMTEVLGCDGFNILQNNHEVAGQTVFHFHMHLIPRYQNAKNNDILMWSHENFSDEEMAQIRDSLSRNMLNQTNKAGITLLSNEDYLHIFHEIKNSITLINSSLQLVEKKHPEVREFDYWSESMSELCFLKNMVIQLSSARLCNQLNLMQVSIYSFMHQIDTSIRVLSWKNFVCNFQLEENLPLIELDPQLLKQAVINIIKNAFEAMHESGTTDVHVFYEEPFMSIAITDHGGGLDPALADTIFQPFITSKTGGSGLGLVITRQIIESHHGTLTCDSRPGDGCTFTIALPLTQNMKVNIYYGGRGLLDDPTLYVLNKMEEVLRELRVTVDRINIYEHKNEIATLPQTMKEADGIILATTIEWLGIGGYMQQFLDACWLYGDKEKIQTTYMQPIVMSTTYGEREGEMTLANAWEILGGLPCPGLCGYVEDLVSFEMNKDYTVIIEKKAENLYRTISQKMKSLPNSNLAVRQSVLRTPQMELTPQESEQLSKYVSDDSYVKKQKEDIQELASMFKDMLGKVSQEEDVAYIDQLRNAFVPQQDFHARYLFMFADKKKPLFIEVKDEDLTIQYGQEENIDIYAKLTPEVMDGVIAGRMTFQRAFMTGEMTAKGNFKILRMLDTVFNFAMENAAVANVLRGEGYRYCHTNLAEAGIYYKYYQEGFHIVMAVDLSGGNRFSVQQYRSMEEHAMDLFYHPQGRLGDFPDGFPVYHVEMLTLLIGGDSEVERKLCAECRNVWVYQPQSGRLLIYENQPGDFFGLRGALEQGAGTGGAGETSRQGTGAGGWAETSRQGAGACGWAETSWQDTGTAYASAQNTAKNRLGILWKNIRAEYVTIALVTVNVITYLVLEWLGDTTNGFFMAEHGAMYPDFIRINHEWWRIITAGFLHFGAVHLVNNMVILYCMGSRLERVTGHLKYFLIYLVSLIGAGLLSYGMMLRTGDYAVSAGASGAIFGVIGGFLWIVILHRGRFEQITTRGIMMMIVLTIYYGFSSAGIDNWGHIGGLLAGFAATVILYHRNRQKYMKIQYIRKLTASYMVLAQCEELQEWEKKMIAHAPKGNIVFAECVQENGEKYLWYNITGKQALDAVLETETFSYDMLCNVLNGIYEAVQQLEGMLLPAQSILLSAESIFVDYRTRQISFCYYPGNPMPLPEAFRTFMEYLLTRLDHSDERAVKAAYDIYGQSSAGGMELKELKSLLLMPYEKDEAKTEPEGLDDTEPEEPKAYATVGQKEQDGKRDASIWKQIFRGESTVQELLAAVWEKIWKTTGTAAGRPVGKIAGKLAGGTTGRPTGERAGKAAGERAGKAAVSGDKRRTGRWKIGGNMKNAQKEQEPFVFEPEEEEHKSVNPTVLLVGISQKPEGILRYEGTGGYSDLVIEKDNYVIGSAAECDGRIPSATVSRRHAKISKKGAVFFIEDLNSSNGTRVGGELLNYKTGMSLQKNEVVMFADEKFRFIMNGWRGSLTIEAALVVPLVLALFAFAMKSGIQMYTECRDTALAIGQEQEIEAVKMFYRWQEAGELFQNEDTVYMQNCVGEVLLLGIFAVTAYRDWKEQMICVYVPLAAGIAGLVLHLMLPTQKLTDLLLGAGIGAVLLLAAWVSREEIGYGDGAMLMASGIFLGFWRNVELFLTALMLIVPAALFGLIVKHRRKDYRMPFLPFLFAAYVFQLGWRMPVLACFFVSVLFFFRIMQIQLEVQKALDDTGRKLAVCAAAVSSDGAALPRIAEALLLREMADRTEAETYITGGKFGISLIGSDFSGEEITLRAAYHIRLPIRIFWLWDFAMEQRADCRKWTGWSAAEGSDEDQWVYVTQTGTVYHREYSCTHLELSIRSVAEAEIAALRNENGEAYRKCMQCRYAENAFGRLYITNQGDCYHKDLGCSGIKRTVRMIRLSEVGTRRPCSRCGQMRKRASITVFSALAFALVASFLMALLEAGRVYQIQTYADMKSTLALESVCAEYQPVLWEEFHLLGLDGAYGGDIFSMDHVTAVLRERLDRNLDVDGAGGSILQVTLAGAEPVAYRLMTDQEGSVFLHCVAAYMKQNMAMETIRALQERYGEHEQVEQSGQGEESIEDARTAIEEAKSERREQAESDGTEAVIPELPPEQENPLEVVHAIKQNALLGMTLGDFGAVSTRQTDLGDSIERRQKQTGNMEIQVSDWYDRILALEYMDQYFGDYLGESEDHALAYELEYVLAGKGSDKENLESVIKRLLFVREAANITHILGDGDKRAKTLGMAEALAGFTGNPAVVRLVQTGVIAAWAYVESILDIRALLAGDKIALIKTETQWTAQFGSLAAAFEDGKKAKNCENGVSYQGYLKGFLYTVSSERLAYRMMDIMERTVRLHPMYADCRMDHVLCGISYRMDYEWQPLFSGLMVHTGRDLSGLCYQTQRTFSYDMRGIREFIREEDGVGVVELILILVVLIGLVLIFKDQLTSLVNDIFDTITKKAGKVMIVCGIALGLAVLGWAVSRKWGRKDWQKGAAVIAAAACLGLLSGYMELQTDEDPEKGLLRRENGEGDYEADLRMYVDGAKKAKAYKVHVPEQELTKQEEQAYLRAAEEELIKEFPGDNESVNCIRDAVVIREEYQEGHVEAEWSFDNYRLIESRTGRIVGEPDEEGELVNVQVTLTCGKSRCVQEFYICVYPRLLDEEERFRKGISEKIARQQPEAGADRLFLPDEVEGHTIHWEQRRDQRPEKILILGVILACFVPVVSMSRKQEEQKKRKMLLELEYPDLVSKLALLLGAGMTLQGAFRKIAGAYGQKRTQNKTAEMPAYEEMLVACRQMESGVGEQRAYEHFGERCGVASYRKLAGILTQNLQKGTRGITVLLEQEAQNAFEERKHAAKRYGEEAGTKLLFPMMLMLGIVMVILLVPAVLAFQIMDYRKYRAGFVEKLACAAVGAGAAGMAAWLFYRSVWGMLLFPAAYLVCVKKYCALQKEKRKEQLLMEFKDAMQSASAALLAGYSVENAWRETEKELLELHGEKGFMAAEVRWMNEGVRMNEPLERLLLSFAARSGCEEIESFAEVFAFAKRSGGDFVHIMQTTVQKLAGRIEVEGEVATVLAGKRLEGRIMEIMPLAILAYLQVASGEFLDALYGSAFGVAVMSIAFCCYLAAIKWSEHILNIQIMQIAGEEIERLRRQIMEQIDLTRTVEDEEVYQLIEAQVRDFARERMLTLGEREAVVQTLFYSLRKLDVLQELLEDPAITEIMVNGAEHIFYEKAGRLYKAEYGFSSKEKLNDVIQQMAGYSNRMVNEASPIVDTRLADGSRVNIVLEPVAIDGSAVTIRKFPENPISMEDLIRMGSISQEAADLLKILVRCGYNIFISGGTGSGKTTFLNALSQYIPREERIITVEDSAELQLLDKPNLVRLETRNANTEGVTPITIRDLIRTALRMRPERIIVGECRGAEALDVLQAMNTGHDGSLSTGHANSCKDMLSRLETMVLMGMELPLSAIRSQIASGIDILIHLGRLRDKSRKVLKIVEIAGMEQGEVMLHELFRYEESGEEARHVRGTLMRTGRLMHTEKCERAGMNPEKEGSSGLMNKIAVAVCDTDREYRDRFVTYLVERKAEEYAVSAFSMPEKLLEALEEEKPDLAICGTGFEEMAERLAGYDIPVLVLQETMADAVAESVTYGSVPESCRGICRYQSMEVILHEVQVMTLTGAGSRRMENIGTGMEVIGVYSPICHEMQMPFSMVLAQKLSTEKKVLYVNLMEHSGMLELLGVPGECDLGEVILALRRQRLTAETLGRGIHETEWMHYVEPFDNPEDLGEMTAGDLQELISFLEKQTSYEILLLDFGQGLRDFLSFLGLCTSIYCPMKSGFYYDCRMDHFRRYLEREPAADIADRMQVIRLPFSAGKIRAGMDVYRQFLWSEFGDYVRNHIGGREEMTLTLLTVLAFAVAADFREMRISNRLIASGLMMGLALRILGEGGAGIVHFLVNISIPVILLFLLFQLRVIGAGDIKLFSVAGGFLSMRQLLYVILAAFVTAAVIGLGKLLYQKRMAGIFGNQRTLIHFSAMILIGYFIVVWGCAIEMQEMSLTSFWIIAGSCVLVLGIMILKNRARFALNFLVRAVLGACAIACVNKWLAQQGIMLAVGINPVTLLTTGSLGFSGVALLYGILLLKILMLRFFQPEKTNDNHYTLLINDLHQTAQDLQDAYRNLENVIDPDLIDCYIYELNSVQMRYKFLLTSIRNYELRTQKNPEDFYTKNPLELSESMKKEQIVDFTRRISQANRSGLVVVMYDIFFTYLDDARAAYDAADWDAYKEALRRAQRAIDELISALNFSYDMAKNLYSIYVFCRDSIAKSLYKRDLADAEDACRLMKKLYDGFVHAAGQDHSEPLMKNTQQVYAGYTYGRDNLVETCQDSDSSRGFLVMRINYNVSASIANKNLLGIESNLSQSMERLSSGLKINHAKDNPAGMAISRKMKAQIDGLDRASANASDGISVIHISDGALGEVTSILQRMRELSVQAASDATMGQEDKEAIQKEISSLKDEVDRISKDTEYNTKTLLDGSLDTRVYTKHASRIQVTDQVSPGNYEIKVKTAATQAEVTSGADFNSTAAIGVSGTMSVNGSTVEIAATDTYQEVYEKLRTAGEIGETQIERSKADGSLTFTTDAYGSDATLKLSFSNQALANQFALSDASGNNGLVQDPATKQWIYGSQQTDASGKTTTSVPNGSDMELDDVANWKGFTSSATAKCDGNRVTITDLGGFSLSFLVEAGYEDGATKTDSAGNVLETYDGSLKFEVTDMGTMTLHIGANMDQNMNIRIPEISCESLYIDDLDVTTVNGADRALDRLDDAIARVSETRSNLGAYENRLEYSTNSLDEFGENMTDAMSRLTDVDMAEEMTNYTHQNVLNQAAISVLTQANDLPQQVLQILQMTQITKSTMIGELLQIDQNIAPILLNIGMHCLGCPSSQMETVEEAAMVHGIDPDALVKEINDFLAKDLAMKVWLEAWLSEYGKAWCSMKIEKVNDNQIRCTLTREDLAERQIKLSELAYGTEKAKLLFRDMMQQAAYEFGFEADDIPLMIEAIPLSQDTIILVITKVEYPEELDTRFSRFSDPDPEDVYEEAMAGGGAAPAPEGADDILGLFRRIQEERRKAADAQGSKDSFVSEENDKKKETPVNVLVDITKLFVFSDFSEITRLAHTLQGFYQGNNDLYKNEAAHRYYLLVSKSRQTPEEFNKVCNILSEYGTQQTYTPAAGAFMKEHYQVILKNHALQTLAELMIKILQKSCFREEVRFQGERRSIRQRPGDSLDGPINLQLEMLGEKYGTETTGTEYGKNPVLAEQNNFFYAKSAPFIVWQIRISCICLMIEEYIQGESLETFVSHQKSISEELIVKLGIQLCDIFTYLHHLSPYPILYQDLKPEHIILCGDQVKLLDFGIASFFTGFGKNFQLYGTSRYCAPEILRGQPVTPAADIYSLGRVLTELSDAMSCRCSRQLRCILEQACAADPADRCQEACDLKAALLRVPLSENQQSSHLIRNIAVIGSRPGAGATHISISLVSTMNQKHIPAIYIAADGSASLLHAARANHRLIDQNGIFIYGSFRGIPDYGDSISVSVPPDDCVVRDYGTRAPALAELASFDLILFVLNGGDWDFVQAAAYGKQLALLPQTRFLCNHGCRSAAKAYARQLDHRVYCFPEDAVPYDTTPEKERLVSSILPKKGGRRHLLFMTQLAISLSTYCASRRRLRTACLELHKRSELARLIPESALADSIHRHALQCSKAPDAADTSKAEFFHFRLHGVDYYPNLAPDAVPRLLNMGYDYLILDLGSLNESAAAEFLRCDRKIVLGSLALWKTWSYEEFFKQFNNFTNLGEGYHYLVQVGTFQNHSVFSRQHSISMQEVPFIKNPFHIEKEHFLFFDILLSFYSLMNDEHMQRLYLELTSLENRGITIWLEGAKSSSQDVASQLCVQEESTYMRDYIFDEGVLKEVHFDKIRKDLPMEKSFLLLRDFPYIVAYCSTKSKLFASAIFCVPQNEKREPAAGDCELGRQFPAVFLSNNIHCIDSMTGHMKNTKKNIIPVIAVLVLIVIIILFMLLGRLIEKYTPSKEHQELSEYYGLASDDSVALIFNNEVLSVQGRLIDGNVYLDFETVHDKINSRFFWDANENKLLYTTATDLISADAESTTYYVTKDARTLDHTIVKADASTAYIAIDFVKQYSDFDYTVYDQPNRVVLTNQWGDYNTAPVKKSTELRYQGGIKSPILADLAKGTVLTVLEPDETWTKVMTEDGIIGYVKTKALGSTSTATRTSDYTAEEFSHIKKDFSINLGWHQVTNSSANANIANVLSNTKGLNVISPTWFYLKDTNGGIGSLASSDYVNYCHQNNIEVWALVSNFGAKDQGLESPDTTQVLTYSSRRESLINNLISAAIQYKLDGINVDFESLDPSIGDSYIQFIRELSLKCANNGIVLSVDNYPPTAYTAFYNRSEQAVFADYVILMGYDEHYAGSEEAGSVSSIGFVNQGVADTLQSVPADQLILGMPFYTRVWSETPVSDDGAAVSTTEDTSDSDTLYELDCYSAGMKEVQNLISTNGAVPVWSDTDGQYYVEYINGGVTYKIWVEDATSLEEKLKVMQSNQLAGGAFWKLGLEDPAVWDTIIKYINMSLCLLAAAFILAKQGAVLVQSEKAAREKICIVVDAGHGGSDPGKVGINGALEKDINLSIALKLKDLLEQREISVVLTRDSDAGLSPADATNKKAADMQKRCQIIADANPAFTVSIHQNSYTTEDIKGAQVFYYGQSENGKRLADVLQEHLISEVDPQNTRVAKANESYYLLKKTPTPTVIVECGFLSNQSEADLLLTEDYQSKLAHAIYLGILSYLEEESLLMRVEQQSQNIIDVVKQSIGPEEKSGAVLSQYTTGAAGAAVEKSSVSDNAKSVNLKDAIYAKPAAEDKQTVAEEIEASATLDVEERKNQMAVLSNTTSPEDYAKMQEDGFSLDDTTTNTIVTETDKIKAQLAKAGVDISFFGDDLDYEQMAAITGSEALARQLAQAMKEADLPCTEENVRGVMEALSLAQTLQTPGDGAVKYMLDNGMEPTIGNLYKAEYSGSAAYQANPEAAVDMTMFSDQIDAIIARAGLSVDDTSKEACQWLLDNSVPLNEENLAYYMELKNLSLPVQAEALLGSMAAAVAEGKSPQEALLVDGQSFADKAQDACDVIGEATDEDVAYVVDHGMELNIRSLKEAMAHRSGEETADSASGDAQEETAESSADGSTAYTQRELDLLTARRQLEETRLAMTAQANYALLKKGIQIDTQPLAELVEALKETENQYYEQLLKGQGVEASETNVNLFRETTERVNDLKTVPAYVLGAQGVKDASVAEVHDTGRAMRDTFERANQSYETLMTAPRADLGDSIQKAFRNVDDILNDIGLEATEANQRAVRILGYNQIEITQESVAEMKAADEQVQRVFRNLTPATVTEMIRRGIDPLDMDFSTLNATAEQIKRETGANDERGFGEFLWKLERTEGISQEERASYIGTYRLIHQVEQSDGAAVGALVNQGADITMRNLMMAVRSERRSGKMDYSVDESFGKVEGSGYSGTSITDQMEAAYQNNCVKDVADLLTPERMKVVASQTPDWEEMTPEQLKEALAQAQTDDASQDYAYAKEQLDQLSQSAKMTQDIYTVLQKYDIPNTMTNVMAMEAMVNDRNGVFRQIFGESAKGSHKEENEEQLARAKEQVLEDFGEAIASPEGLAAAQEQLAEVAENVMKGMIDSDDVTSLDIREMRLLSAQLSIGSMMAKEEQYAIPVQTESGVVGISLKVVRGDGEKGLVDITMETKLHGKIAATFQAKEHGVSGLIASDREDTKELLDSRQESLTAVLDSGNEADLHYACIADLDLNHFSTGVFGVDAPEQQETTEKQSDTTYQVQTTRLYHIAESFVRQVQDLLQGTDAQGADAMGMANFSELDRYLFGQATHYEIYRKLGAHPTDEYGIRGVCFDLWAPNAARVWVIGSFNGWDEGANEMKRLEPETMGIFELFIPGVEEGDLYKYLIETKDGKRLYKADPYANYAELRPGTASAVTDIEHFKWSDAEWMKERATHKEDVYEQPLAIYEVHPGSWMRHPGRQDDGFYSYRDLAKSLIPYVTEMGYSHIELMGICEYPYDGSWGYQVTGYYAPTSRYGTPEDFAYFVNECHRHKIGVILDWVPAHFPKDAHGLAEFDGSCLYEYADPRKGEHPDWGTKIFDYGKNEVKNFLIGSALLWVEHYHVDGLRVDAVASMLYLDYGKEAGQWVPNQYGDNKNLEAIEFFKHINTLVLGRNPGAVMIAEESTAWPKVTGPVEDDGLNFSYKWNMGWMHDFLDYMKLDPYFRRDNHHKMTFAMSYNESEKYILVLSHDEVVHLKCSMINKMPGLGIDKFRNLMAGYAFMMGHPGKKLLFMGQEFAQLREWSEERELDWFLLDNPDHKHIQNWVKKLLHIYRKNPALYELDSSWGGFEWINANDADRSIYSFIRKSKDGKNQLLFVCSFTPVARPDYRVGVPAKKTYKLILDSDSEEFGGCSRQRPQSYKAVEAECDGRPYSIAYPLEPYGVAVFRYMDKYEYKLKLDQMKSFTAENNYKAAAEIADTINWHKIKNVNALIKAGEIYENVGRYEESRDILLMAYDRSPIGRMIIYRLAEVAIKMGNCEEARDYYQEFVEIAPHDNLKYVLRYEISKAEGADLQTLIGILEELKEQEYSEEWAFELACLYHKAGMSEKCIDACDELILWFGDGPYVERALELKMLYQPLTRQQEEKYRQFRLKKEGVVEVRPEDDLESGEIVSEPVQIPKVKLSPERFNTQNLQDELRKNMVQIMEATDKEKVEDSMDTIKKLVEEIPYLQIPKEEPLPQDTIEMPHIETDAEIDNSLKSNFKELLAEDYDGQISMYVPDKGATEPQVTGQMSIDEVLADWEKTKRAAETALEEAKQRKLESAKARALQEAGDIMERLVDVIPKLDSGLTPKDLLDEEYLGGQPIADDKAAEMVANMNQILQQEIDRLSSENARMDEQLAAASAAEAAGVAEPQEALQPEEADFWGNGITELTQSPYEIEPGAEQLAAEAAYEPQTDAGYGAETEPVYAPEAEAVYEPQTGAVYETQTDAVVSETEQADAAGSYGGIAEPEIPGSYTEETDPDTFTLGADVQALLAEEAVAKDTAQPQAAEEPEDTDDAAGMEEPDTAALGADIQALMEEQKIQPEDEELPKAEKSGGKLAGGGHPKSGASKAKAADDVLPKIEEPEEEGHQAITRLSKEQREIFTYFVPIKGMEQQLCQALTGAAARLSSGKTASTGNMIIQGGQGSGKTVLATSMIKALQKEVGKPNGKIGKIEASVLNQKDVAALLKKVAGGCLIIEKAGAISRETAVKLGTLLDSDNSGLFVIMEDTRRGIEKALSRDAGFAARFSEKINIPIFTSDELVAFARSYANELGYTIDEMGVLALYNSISNIQKLDQATTLTEVKDIVDEAIAHAERGGLKKAFSIITSRRYDDDDYVILHEKDFGFMDSERRQTDNTSGDRNGGWNLKQYVVIALVVFITFCCCILFFFMIYRYNGFADFWKKLTTILQPIIMGLVLAYLLNPVMKFLERHLMKLLEPRMKSKTKAKKMSRGVAIAGAWVFLGGIVVLLIAAIVPSIIQSIQGIATGLPSEVKNIMDWSDEFFKGDSEIVGVINDVLQKASDAVQKFLENDLLAQVQVYLTSIASGVIYTLKFLLNLVVGIIVSIYVLASQETFAGQAKKIIYAMFKPVRANVIVETVRKSNEIFGGFISGKLLDSAIIGILAYVVLTIMRMPDTILLAVIIGVTNIIPFFGPFIGAIPSFLIVVLQNPLQGVYFLIFIFILQQIDGNIIGPKILGDSTGLSSFWVVFAILVFGGLWGFPGMLLGVPLMAVIYYVAQKLVSYFLRKRGLVDDTGSYIHLMRIDKRTNELVYEEKTEKGTEEKIEESPEKMGYNVRIGKSEHASKRMQMLAAAAGSDACERVSGSGKPMMNPRKVAVIGCGFVGASIAFALMQKGLFSEMVLIDANHAKAEGEAMDLSHGLPYTASMDIYAGDYKDVADCGLIIITAGANQKPGETRLDLIEKNVGILKSIVPQITATAFEGILMIVANPVDVLTYAAQQISGYPVERVFGSGTVLDTARLKYQVGRHLDVDSRSVHAVIIGEHGDSELPVWSGANVSGIDLNHFCELRGHFNHEASMERLYEEVRDSAYEIIERKGATYYGIAMAVARIAESIVKDEHAVLPVSVELQGEYGLSGLALSIPSVVGKNGIEKVLEIPLNEKEKNALLASADQLKAVIEKLTLNMKLYDSGVYLVNGTELVADDAQAAAAIKSRTGREVAKAEAAQGTIAYGILKDHNVSGNMDKLQVKFDKLTSHDITFVGIIQTARASGLEKFPIPYVLTNCHNSLCAVGGTINEDDHMFGLTCAKRYGGIYVPPHQAVIHQFAREMLAAGGKMILGSDSHTRYGALGTMAVGEGGPELVKQLLSKTYDIDMPGVVGVYLTGTPRKGVGPQDIALAIIGEVFDRGYVKNKVMEFVGPGVSNMSVDYRIGVDVMTTETTCLSSIWRTDDAVKEFYEIHGRAGDYKELNPAAVAYYDGMIEINLDEIKPMIAMPFHPSNTYTIEELNANLMDILDDCEKRAEVSFDGAVKLDLKSKVRNGRLYVDQGIIAGCAGGGFENICDAADILKGASIGPDEFTLSVYPASTPIYMELVKNGAVATLMETGAIVKTAFCGPCFGAGDTPANNAFSIRHSTRNFPNREGSKVQKGQVASVALMDARSIAATAANKGYLTAATDVDVDFSKPKYHFDSAIYANRVFDSKGVADPSVEIQFGPNIKDWPAMSALPENMVLKVVSEIHDPVTTTDELIPSGETSSFRSNPLGLAEFALSRKDPQYVERAKEIQKAQKAVEEGTCPVEAVEELRPVMDAIRAAFPEKTFGEEMKPGTLGFGSTIFAVKPGDGSAREQAASCQKVLGGWANIANEYATKRYRSNLINWGMLPFVIPEGALPFQNLDYLFLPDIRKAVEEKQSEITAYVVKGSELKEFRLGLGAMTDDEREIILKGCLINYYRGMVKAVIFDMDGVLIDTEKWLNKYWRQAAAEAGYDMTVEDGLAIRSLAAKYAAPFLQERFGADFPYWTIRERRKELMKAHIAANGIDKKPGVDELLDYLRAHRIKTAVATATDPARTKDYLTRIGIYDKFDRIVCATMVENGKPKPDIYLYACEQIGEAPADCIAVEDSPNGVRSATDAGIRTVMVPDLAEPDADTAKRIAAKAGTLFDIILMFEDGDLSMEKRSYSYGMKITGVLLHSFFTIVLTVSVFLLASLVSKNILELTDIGTDDFLSSGYYLKCMEQKCNDLNDYLLLTQKGALRTAEDEKRYLQYTNEFKQESTNFCYWYKINGVWYTNQPDTREGQQFDTQTVLMEAKTMGDYLLYDMEDKEFGTDIRGLENYFFSNNGNQIYWPLEDVVLVIGVDTQLSAGDDLRDAKIEYERLHPWIKVSIAGAIISLLGWILTLVYLTLAAGHKEGEEGIALSSIDRIKTELMIAGFVFLSAELVMLLARASSREWEVAGLLVASGTISFLIDTLFLIFYLSMVRRLKAEVMWENSLVCWLGRGIEKTFRERSVTVKILMIFAIHMIVCFFLAAGAFYYRNVPALIALLLFSAMEAYILLRKAVEHYQILQGVEEIADGDLSAKIDVEELHGEDRKLAETINNIGAGLLHAVDDSTKNERMKADLITNVSHDIKTPLTSIINYVNLIQREDVDNERVKNYVKILDEKSQRLKQLTEDLVEASKVSSGNVKLEMHKIDIVELVCQTGGEFNEKFEDKELTIVTKLPRQAVYIWSDGRHLYRVIENLYNNVAKYALQKTRVYVEVQADEERAVFSIKNVSARSLARENSEVEDLTERFIRGDSSRTTEGSGLGLSIAKNLTLLMGGMFDISVDGDLFKATIALPLYVEGQEERGQMQTILVCDDDKEIVEAIDIYLQQEGYQVLKAYDGEEALEILKEKEVHLLIIDVMMPRLDGIRATLKIREESSIPIIILSAKTEDADKILGLNIGADDYVEKPFNPLELVARVKSQLRRYTQLGNAAENDASVYTVGGLSINDDLKEVTVDGETVKLTPIEYNILLLLVKNQGKVFSINQIYESIWNEDAIGADNTVAVHIRHIREKIEINPKEPRYLKVVWGVGYKIDKNMLLFWRIFDMKKKKTKKRRRVILLIAEIILILLLTLLLFAVVKLSKIQKTKLDMDQVAINEDLSSETMDAMSDYRTVALFGLDNRTNNSLSKGRSDVIMLANINNKTHEVQLVSIYRDTYLDTGSGVFEKCNAAYAKGGPEQALSMLNTNLDLAITDYVTVDFSAIVECVDLLGGVEMTITDDEASLMLGYIQELNRLTGNTASCPSSGGTYTLNGVQATAFARIRYGGGDDYKRTERQRAVLSAMIAKAQKSDLKTLNALINTLFSDIQTSFSNADLLALATNIFNYKLSETNGFPYEKTAHRYDKVGDVVIPCDLSSNVTALHQFLYTDMAYTPSDTVKNNSEMITSKTGYREGDGFMDKNMADRLIELREKNHLSQSAVANRLGVTPALISAYEKTERNPSLERLIALADIYHTSTDYILGRTTTDSYATIIEVKDLTDAQIRILRELVEVMKHTDATRSMSIKDRILKRRERFAYERAHWVDADPEESWFYLMTNIQRNNLYSLVLIGPAIFCILFYYFTGITPNIALSYLIIDMIVIFAKRHFAIRRIREDQAYARLGDRTEVLLQMVRELSEKDQMKREQNTDHTDKRDKNKRHRRRGGTDKRDKRKSDTTTGMQADLSKKDEQFREFSLNGPMWRVVLYVGFPLALYESLNQLFKILDTMMASHIGASAVSAVAYLSQINMMISAVGTGLAVGASIKVSQAYGAGDFMLVKKRVSTMFAMCGALGIAILLVLVPFTPEFLRLMNTPEEFIADGSTYFRLELFGMIITFFNNVYIAIERARGNSKRILILNTAVIVVKLGLTAWFVYGLGGGINMISCATIISQSFLLLAACINMNQKGNAFGFSLRAISIKKEVICPMLTLSFPVIVERIAFAVGKVIVNSMSTVYGSWTVGALGISNNIGGITTNPQNGFQEGGSSIISQNLGAGRPKRALLAFRWVLYIDMLIGLVIMTASLLCLNQLAGLFAGDNAEFAEMIKQIYRFEAVGAIPLGVNAAVMALLYGFGKTRVTLVMNFCRVFLFRVPVLWALQQFTDLGNVSAGIVMAVSNVASGVLAAVVGVIEIRRICNTYDVRYFGGERKNMNDFASSSCHDRIANFKITQVQRDSHFDMGESHYHPYYEFYYLLSGQCRCFISHSIYRLFPGDLIMIPPSVLHRVLYETKRPAERINIFFSEDYLHRVSVASGPDLCAGLFSRSRLTVPSSSRPQLERLMTRLRLESESSDPYAPLMTKSLFSELLVEIARCQDVHQTPQFLDETSTAIQESARYIYEHYEEPVSLAAAAAVAHMNPTYFSKKFRETTGFGFKEYLTHIRLQNAAHLLRTTDTSITEIAGICGFSDGNYFGDAFRKHYGMSPRAYRLTMSAQDKTEQVLREMHIMYANSEVYDKATNRVIIDKKEALNLLQRLNVCIYELMEEHELTQQSRDAAERQFRKKTDGIVEDANRMAEDVYAGSVMYTDEALHRVQDIMQDAMDSVREICDKMNDALAQEKSNVRRDQSELKSHLEDLRDTNKYMNLIEQRNKEIAKERAKREQEEEEATSVYASVKPEIKINEEYFEKNGIPLETEEPEEEPEKNTGETGAEIKVNLDAEYFKKKPERHSFFGKRPKMKNKKRILTGLLAAALVVPLFAGSAQTAAAAEAAGKTLDVVFTHDTHSHLNSFSTVIDGESTEVGGFARIKTVIDEQKAENPDTLVVDGGDFSMGTLVQTVYEDEAAELRMLGAIGCEVTTFGNHEFDYRSSGLAQMLKSAAESGDVLPELVVCNVDWDAMEAAGLNDGQQQIQSGFEEYGVKDYVVLQKGDVNVAVTGVFGVDALACAPTCELLFRDPVEAVRETVAEIKANEDVDMIVCVSHSGTWEDESKSEDEILAKSVPDLDLIISGHTHTELAEPIVHGDTYIVSTGEYGKKIGELSMTQKSDGRWEITDYKLVPILSTITADGATQEKIDGFMEAVDTGYLADFGYTKDEVLATNNVQFSTLHDLEYEHTEHNLGDLMSDAYVYAVENSDDFDGVPVDVAVVPSGTVRDTYTAGDITVEQVFNSFSLGIGPDGVPGYPLISVYLTGKELRTAAEIDASVSDYMTTARLYMSGLHFTYNPNRMILNKVTDVYLTDENGSRVELEDDKLYRVVADLYSGQMLSAVTDMSHGLLSLVPKYADGTPIEDFEDVIVMEGDRELKAWDSIARYMQSFEDTDGDGIANVPSYYSQMHDRKVVDESRSLGDLVKSPNKYAAMIIAVILIVIILVVLLIVLVVKLIKRIRRRKADTIHKRMLKEYAQYVAKVRRYTAEMELDAAVKRAVEECIAEGILEDFLRENRAEVEMVSILEYDKDFEEKKLREAEYEAGREEGARFGLAEGIVETGCAYNVPEPDILARLQEKLDIPLRKAQEYFAMYSKMEKLATTVSEPHAKREYKDTVFRMLFSDKEKLLSLYNAMNDRHYENAEDLKIVTLKNAIYMGMKNDLAFMVDTQICLYEHQSTKNPNMPLRDMFYISLEYQAYVNNKSLYSSTLQKLPTPKFVIFYNGTEDLEECTELRLSDAYENLEGEPNLELRVIVLNVNEGCNRKLMEHCMVEMKDGKKILTTPISAEDLADIKAGDIIYLNGSMTTCRDVAHRRLVEEGRELPVDVRNNAIFHAGPIIRPLENDKFEMVSVGPTTSMRMEKFEYEFVKETGVRVIIGKGGMKENTERACKEFGAIHCVFPAGNAVVAATEVEEIVAAEWRDLGMPETLWNCRVKEFGPLIVSIDTKGNNLFEKNKIEFNKRKDEQIEKISKQVGFIKMSKEAQVEQLTDYMAKFIAHVAKKLPDDVIAKLTELRAQEDSPLSKTIYDTMFQNQELAVKLNRPSCQDTGVLQFWVKCGTNFPLIGELEALLKEAVVKATFEAPLRHNSVETFDEYNTGKNVGKGTPTVFWDIVPDSDQCEIYTYMAGGGCTLPGKAMVLMPGEGYEGVTKFVLDVMTSYGINACPPLLVGVGVATSVETAALLSKKALMRPIGSHNDNERAAKMERLLEDGINAIGLGPQGMGGKYSVMGVNIENTARHPSTIGVAVNVGCWSHRRGHIIFDKDLNYTITTHSGVELMEASVITLLFLLFAVVMFVWEKIPLGVTSMIVCIGLVVTGVLDWKTAFAGFVDSNVILFVAMFIVGGALFETGMANKIGGVVTHFAKSEKQLIIAIMIITGVMSGVLSNTGTAAVLIPVVIGIAAKSGYSRSRLLMPLVFAAAMGGNLSLIGAPGNLIAQSAMEDMGKAFGFFEYAKVGLPILITGTIFFALFGYKLLPEHKGGEDGIYDETKDFDHVPKWKQNLSLIILVLTLIGMIFEKQIGIKLCVIGAVGALALILTGVISEKDALKAIDLKTIFLFGGTLSLASALEETGAGEMIADKVIGLLGANPSPYLLTFVVFMLCCVLTNFMSNTATTALMVPICVSIANRMGADPSAVLMACVIGGSCAYATPIGMPANTMVVTAGGYTFKDYAKAGIPLILVATVVSMILLPVLYPFFPMEQTLKIYFTSDVHGYFYPTTYGDLKRKDLGLFSFARDFKKDENTLVIDGGDILQGSAFAYYCRQKSGSPQAIADIMNDCGYDYYTLGNHDFNYGMDYQNAYIEAHHGACVCQNVVDEAGRACHPYVIHTLGNGLRVGIVGIVTDYVNVWERKENLAGICITDPFEAAKEALLYLKKEVDITLCIYHGGFECDLKTGERLQKTTENVGYRICRELDFDILLTGHQHMSVDGQYVHGTYVVQPLENAKEYHYLEAERTKDGLVVRSEKRVADGANAVGALCENYAAEEERVQSWLDQPIGHLSRALLPGEKAEMALHGSPIADFLNRIQLHFSGAQLSAVGLANEIAGFRSEVSVRDIIATYPYPNTLIVCRISGKQLKQVMERSAEYFAVATDGTVQVAESFLVPKVEHYNYDYYMGAAYEIDPAAPVGNRIKNLTYQGKTVTETDSFTLCLNNYRYSGAGGYEVYTECELVREINTEMVELILEYFKENPYVEVMKKEIDKMYEQEPKTWYAKILVALIVAALLAWSMSTVQSGTTGGDGLTVAGKIISGIFHPDTALLFNFTTSGVAYLLLETMCIAFLGTIVGAVLSIPLSFLAAANLVPKPIALIFRVFIMAIRTIPAFVYGLMFIRVTGPGPFAGLLTMSLCSIGMISKMFIESIEDLDTKILESLDAAGCTMFQKIRYGILSQLFPDFMSTLIYRFDMNLRDATVLGLVGAGGIGAPLIFAMSAYKWNQVGAILAGLIVLILIVEVISTKIRVKLTRGMGIYDKIFKPKKLVLSDGKVVEEKRTRTPLVLLLLLIATIISVRITGFSLNTILTRGNQFFVILGQMFPPKTGYLSSIWGPLLDTIKMSLLGSFIGGVLAIPFAILASSNLVKNKVVLGVVRIFLSIVRTIPTLVAALIATYIWGLGTMAGTVAIAVFTFAYVGKQLYELIETVDMGAYEAMEAMGAGRAQAFLAAIQPQVLPAYLSVCLFCFEGNVRYAAILGYVGAGGLGLILNEKIGWREYDSVGMILVVLFGTVLVIEALSHYIRKKLTMIEFSNVSKVYPNGVVGLDDVNLTIEQGEFVGIIGLSGAGKSTLLRTINRMHDITSGTLTVDGQEVKNLKGKQLRKFRRNIGMIFQSFNLVTRTTVIRNVLMAKVPEMPFWRVLLGIFKKEDKLNALEALDKVGILDKAYIRADQLSGGQQQRVALARTLAQNPKIILADEPVAALDPVTAKQVMSDFKKINQEMNITILINIHHVELALAYADRIIGIRAGKIVYDGPSADVTEDVLNMIYAGKIPDEVEEAMKRLTATLLAAAMCMGTFAGCGSNTEETTDNSNAGAAAGETAAATTESQTASAENVHLDALNVYFVPSRDPEEIVTATEPLSDLLKNELAGLGYDVDSVNISVGTTYEAVGEALSAGTADVGFIPGGTYVLYDDGCDVILTATRDGLNKDSDNPADWNDGQPTEASDKQAVSYRALFIAGPSEKGQELADKVNSGEELTWDDLDSANWSVMSSSSPAGYIYPALWMQDRYGKGITDLSNAVQSDSYASAFARLASGQVDVLVTYADARRDYEENWTSEYGRSASIWEETNVIGVTDPIYNDTVCVSKTSPYMDENLKTAIQTALINIGNTEEGKAVIAIYSHNGYEPAQSSDYDKEREAQKLIQELNAANMATIKEIAELAKVSPATVSRVLNQDETLTVTAEVRNQILKIAHELNYIPPKMRHAQNKTHVTIGVADWHLVRGDRHDIRLASLDHIAAAMPQKADVSFLRIACREDADVDGILAFGSFSEEEINFLRKQSDAILFVNSDQKDYEFDRIIMDYEQGLKDMVHYLLDVKEYRSIGYIGGIYEKDGVRIGTHRLMGLTEILAQRGCYKEHYFCVGEISRESGYRLTRELLETDDVPEVLVLGNDEVAEGALEAVKELKYRIPKDVAVVIYRDIETLQTKYPTYTSLRMLPDIVWSTAIKLLLERIIDKRVDSMKVYLPTKLELGDSAMNGLHPIKMPSAKEKVAAELRKAILSRQLQEGEAVTLESVANQLEVSVMPVREAFQILARDGLIKLQRNKGAVVLGINETYIREHYQLRAILESAAAEMCCAPEVDITRIEESYECAAESIQNNDFAAYADQNREFHSEIWSAAGNSRMENMIAELWNGLSMGSMITEADYAKVSIEEHERIMKAIRERNGAAAKEEMYRHIMRSRDDMLTNYRMNKRTADYIADQLADQILSGAIRGGTPLKQEELSGLLGASRIPVREALQIIEHQGLAVRLATRHVVTADFSDAHIREIYGIIGDIERRVLCDLAASEQQGENPGIFVEETLTELEFHRRIYGMTDNAYVRNILKNAVECYVRFAISLPRQETGSADAEYRKGTEWQDGFWQKREVKSRQLSADELRGAAAQMEPYYEELAARVVTERGKHQMESTLRRTWAEIDLDALAHNYHKLRERIGADVKFLGVVKADAYGHGSVQVSHLLQELGADYLAVSSIDEAVELRLNDVTMPILILGHTPKEQVSRLIEYHITQAVSCEAKALEYSEEAVKCGGILKIHIKVDTGMSRLGYLCDGDYFETGVAGICHGCSLPGLDAEGIFTHFAVSDEPGEDCKKYTEHQFDLFMRVIEEVEKRLGRKFALRHCANTGAVARYPETFLDMVRPGLLLYGYGEFADELGLLPVMTLKTTVSTIKIYPAGTAISYGGIFKTEHTTRIGVVPYGYADGFFRCLSNRCALMTKEGPAPQRGKICMDMCMIDLTGKMGVDVGSEVEVFGKQNSINDLAALAGTIPYELTCAVSKRVPRIYIRNGKVVEKELLLRGMEEICEFCFKEFAAICLFWNFFVLWFSDNITYHPKWSMLIATLSVLFFLQRMEGNFLFAMRTQSVECSKLGKTRIITDASCGMVRNTGFCDQNLPPHGYLELLSIYFSMLCEVCYFFCGGTDSYFEENAKDGTISGRNHLRKELVMKVESSSYEAYLEALEEWKQKMQESQATQQKEENSATDSYVPGISQMDMDIPMPSSTYNAQGMMSGERPPMPPMPPQETDETTESTQVTGTTPAQGTAATGTETLLAELSETFRANPDSILMKLDELGLSLEDLSDEDNIASLATAMNEGAANMGLPTIEDLDSAVSTLHEKLSANWSSYFEVEEAMSQYLLLKQGTIHNAVDEEAFVADILIEDGKIKKIAPVLEGKVINEASVIDAMGIDVYPGFVDAHCHLGLDGYAVGFAGQDFNELGDPVTPQLSAIDAINPQDETFRMAREGGVTCVSTGPGSSNVIGGTFCIIKTYGNRVDDMIVREKSAMKIAFGENPKNCYKEKGVYSRMSVAAKLREVLQKTIIYDKKLREAGCETSWNEINRGSGEEQVDFSKMPAYDAKLEAMLPVIRGEIPLKAHAHRADDICTAIRIAKEFHLGLRLDHVTDGALIAKELGAEHFPVAVGPSFGHATKYELKNKGFETPAILADAGCAVSIITDSPVIEERYLPLCAGRAIYNGMREFDALRAITIQAARHIGAEDRVGSIEEGKDADFVLLKGTPFSVDARILYTIINGEIVYQSGEMETSETVKEIRSRTGLNRKEFCQKFGIPLRTMEEWETGRRIPPEYIPRMLAYYTRNIDTDNARNEIRNHYDIVEDAEGNKVVIINDLRFKSRRNIDWNTVEQCLKEYVGSCVQILETSDEIYIGKDFPDEYTHSKDTKSLKGANRHAKANASQIVEPMIKIAAGKTFAPNYEEKHVADAKYGWYRYDTRFAIPIYNDEGNLCRYNIFGARILIRHDEDGKMYLYDILRIKKETSEPLEQMFYGAAFDEFNREWQGIAAEEQTEPASHKEEQEIPPDYTKMSIQERVRQLPTPTDDTSQEFEAYKNRMGYDAAKMKSIRYKMSVYDEFLEELEARKKYHGTKAYGRRGTRKRDREGRMLEVAICDDDKEDLDKAALMLDKILSEYQVQYQIRSFLSANELLNNNDKIDIGILDISMEELGGITLGRKLKEKNHDIKIIYITSYEEYMAQAINKVHAFSFLCKPINEEMKTQIMEILGQEKCPEIEKEFEILDESGTKAGCVRLKLNEILYFEYIKRSRKAAIILEDCRYECECTFENLVEELQPYDFAVNHRGCLVNLRHIEKIQGFHIYLDNGKELSLAQKRSSDFREEMNKFLQKTQRREMDKILLAICNGLSCFIICTILFQFMNERYKKSYSNKTLYIAAEIAMGITAFGINMLNFAILNLLIWFVGVGVTVYFLYYEDADRPIRRITECEVLVLCMSVCETLGVLLLHCFLQICGISNIDVVMQYCLEVTFSKIVLIFLYYVLIKRLIKRTEAACSRKQYIIYGIMLFYSLVNMLVIVQNFRDGQKSYLSAVNMGCIVLADLYLLYYVKMADEKRYYENRVKALEQQEKMQYEYYLAQTEKYSQTVRILHDVDKHIRAIENLYGTEREHTAGEYAEAIRSTLAPLIPISYTENPILNILLTDKNAVMQEKGIHSDIKIDNVDLSYIEPIDITTIFGNLLDNAIEAAANADGDKYIFIKISAYHKMTVVHIENSCGKVKWKKRMPVSDKGKGRGIGLLNVKQSIDKYDGDLQLKQDGNRFVADLFLNSMEHDISHIKDIGDIMNIFFNSRIYTNQSFVNALFGKQQKTTRSQDAGCSGTRDTLTISASGKEKLVKNTKGRIHNTNVDKSIDLKSYIASAQKTNQKIIDNAGTQINAKTSEYMSTGKAFRGDSYEDLMKIYNNMNITYSAIEQNSRKNTKQNIPADLEKKMTQYTDTLSISKTGQEIFKHLSSVSFMDYVNRFENEVTEVFAKEDTTQGVKSDTFEHHVNRMATAYNKMKNSIEEKYAAQDYEQEYYVTESGKIEELTKEKELDMLNQAYENHSNFMATSTEIWSELQDFTPSVVYHKGSEQTANEQNIGENQENTARSKENGVIQNSAYQAFLSAIQSDNQKLSQQYSGDWKDLRLNLNVSDGDRKMLNGIWDYYAMESEMSIAGINGYNYSNYYTGTKRNTAKANGMNSGLLSNVSSTSSNITLHMSGTEDSGNALTAVGFPDGSSASVYKSDAYDSANLEYRVRYWDKEGNYTDTNVQINDVDPRNASYLEMLAYTTYSDVEGFTKNAFGDFMNAAGGVNGNITYDSDSINEKKDYMSMIKEFMQLQYDSNNLSGYLSYKELYDYINDRTERMEISNNYSTAKVWNTSNKNVSKSSEKNKWKLTDSLKEKIVDLAKKDAQDNVYMGNAFMNLRKTEVSKVAPNRAALIGKFSQSMNSGNMSAMKEVEEADKKWLCMLFGIPYEAKYQGTGTGSAIHVYNEDGEEVLTYTGGVGWQEKETKAESQVHSALKMTYYEAFSEARKALNSEEKAGSINEDIISQGNFDMKAMQINANYSVNGVPYDNKRKQNNIPQFSTECAVQENENINPYMAEADFDEKAFDMIGPNAPQDVKDAWMEAAKDINANGMGIKKNGMLSHISQMMVQRLNKQLKGDGDADNIDILGNTTESAIQATSQALYDLDHPREYVPKSIEVQRACMKEREVYVAFLEKLEKLKVSWMRDSTLYIGALASNNVNNIVNDAGKYDEYKEKVKDLTEEIQTRKDTFEKMAEPLVYVCDCYQKFNVVTGMPKSNFGDSFGYDMQKDISSHMTDFYAGKVSRGELNSYFEECCTSMRTYRTSQHQTSGTNEADNTQIVSEMYEVFAKENARAASQANYQEGKALNEKYYSDSHSDWTYYNSDYYYQCNETNAALRESVKQMIEKWDLDEIDCDKIEANSSLTLDGGFDFNSTWNFEFRNQAGRSSLAKESAIPPENFKMFFKEQVTSFTEDNKFNGNLKITIGENNYDLKVPFQTLRTGSEGEICNVWDLMEDYYPKSEDTSKVKNFLGNMSVFTRWYAYETRINDIFGDYEVSHKELSMHAEFVSEIKELARRAATTANKTEYEYISRQVLGLRAEYLSDVAPDRKQLYEQAKNTIKKQTGNSKCKGCGELSLLDFLEKAEGKSSNFAEKKFALAGGGTLNCPILTTGGYGAEIQYQGVTVLSNLGNGWGYEMTPAELAKKDEFYSIYWSEYNFVKENGSSELREMPDYLDQDRPSFEARAMKPEHKINIVCKEKMSIGAVPGGTFDFSSEVQNFMIRYIIETIMPIYRKEQVNGFTMMSMNVSTTTAAYANYQNNYKTGIANKKKETAQTTENTKLKENTTESIAEKNLSKAAQKMLENLRGSRNDMDFMVADFENGDNAKDLLAQSDKEYTVIFSKEEMEKMASDPKYYAEKMHSIDGALRMSDEINAQFGFERAFGKTNGGVDADTKITKFGISFNSDGTTTFFAQLEKSSASQKEYLEKLQEKKAEEKKEAKKKEQSKQIEVRKTTVQANSKEEVLDKIKNIDWDSIKPEENKIGGRFDFSIMQITRDNYSQYAQMVQQMFGKKASSNDPLAQCDYGNFSLRFKPVDINFTKPNWDTIMTKRDKPAMSEEEFDEAIKELARKEFATGKRDDDAYRKLCMQHGETVSPDRKAIYESSMKKTGGKMNAACMFWDSKGNKTLSYNPESRNWKAISTDEEFARARVFTSIYNDELARLKEEYGEKAKGNVSYSKIKADISAEESKEKNNNEGNTIDLQIMRIAICDDEVSMVQILEEKIKRLLPDAVIEKYLSGEKLIASGSKPDVLFLDIQMPGMDGMETAKMLRQDNEDMILIFVTAAEEYVFQAFDVGAFHYLVKPFSDEKLKEVVTKAVHAVKRSSRLEKDEKYIMVQTAGSHIKIFLRDIVYAEVFNRKVIIHTRNTDIEYYGKLQDLQNMAGEDFFRTHRAYLVHFKYVEKYDATCVTMKNGTALIAKQNYPEFVRRYLKYNQRKGNEVRMSFVERCWMITSKFSVIAILILTGICFGVFVYPYMKKKREAALVSIVYIGIMSVLYLIPQRIGNFSAYLMGVVAAFLVMYVQDRRNIYQKLFLAVTFFSIRWLAVAMAGRLDDFITKALVFGNTIAGRQWLQYGLYAGTRILDIVLCIVFLAVAIGLINKAYVYKKDEMSGKELVMLIMPSLVGVTGYGILQYYLNIYEKDIGKSLIDTYGFYGALSFVHYFISIIAILVMTIMFQNWKVAQEEQTGQELVLNQVSDMKKHIGEVEKLYQDIRSLRHDMGNHIQILEHLVAENHMDDAAEYMEHLKKEWNEISPEIKTGSPVLDVIFMEKLREAKERQIRFTSDFHYPKDTKLNAFDLSVILNNALNNCMENVSGENPYISITSFRKNSIFMITIKNSYEGTLKYKESDLPETKKSGKEHGIGLHNIRRVARMYLGDISLEQENQEVVLSIMLQVEMLHNKKRAVHNIAVYCKERYAEKSVKRNHVVQIFKETDFRIMRINGFSGTNMQSGTMGMAQGNDSVSKNIQNQIANAKQKLQDLSSNEEMSLEDKMKKRQEIQQEINNLNQQLRQHQIEQRKEQQSKNSSSMDDMVAGTNNTSKKKGTGLSKASMQAMISADSSMKQAKVQGSMATQIEGRASVLESEIKQDAGKGNTEKKEEELAELKAKAQSATAAQMSTLADANKSVEEAAKADNSNTEGTATKNNTEKSEKTQKATGAAEETDSVKNTDIKRETQVTVETPTPENAQNATQQAVYTPIDIRLMSEIKSFSDYTSKYNSNVDYSALFGGTSDSSSVGNTNMLSDYAAIKNGSYGKLMKAYYAKQDAEKLSGKGDTSQKLTLMKTSADSLKKSADALNDASLWEKKKIKKKDEKTGEETEVEDYDWDAITKKVKAFIDDYNDVVKEAGESNTKDVLRNASWMTGMTDKTSHLLSKIGITIGKGNKLELDEDALKKADISSLKTVFTGYNSFAGKTAQKAAGISNAANRASVTYTNNGTYLKTDSSLTSGKIDKEVMKIQNDTGVTYAANTNRYSNTQNAGSKTGRTYKNAHEYKNYLTQKYDCLRSKDYSVNINSSLLSEAMGDEKTKQWLEYNLSLIPKTIEQSEAYVAARGAKILSYSITINGYDSMSSVMCTQDEADPGTEKARKELEERLEKRKAEKKETEERLEKQRAEKQEQEERQYNLRIDGKDVADLTGKLVELLGTSTSIGVMESGTSSFDALAMNDPEKAKYLEENLAAIPDCAKSAVAGCQGTLTNLSYQIDATQIYTKMNKSVSIITDLDGSKIALINDIRFKSRKGIDWNEVEQYLKEYIGEYFEISETSEKIYIGSDFPDEFSHSNDTKGLKGANMKAKANITPAIGELIQIASEKAQYPDYKNKHGAKAQFGWYRYNTRFGIPVYDEDGNLERYNIFSTRMLVRCDADGKLYLYDLVRTKKETSKPHEQMAYSQQLWDEAKRKCKLGEEEIRMAKEMRLNPKSHKRKKMKIKKVDKAKKGMFRQYRAALKESKQSIKTKNSSIKMSIRNCVCTWKLGKQGIDGSHMKCRNEVSQFGKKDTNKSGNGRFQFCSFSSMCGISGFCDFSKNFKKEPVLWEQILTDMHHTLAHRGSDSFGTYLDTHVGLSHARLSIRDIAGGSQPMIRQDGGRTCAIVYNGEIYNTDELLPPLLAAGYTFSTTSDTEVILCAYLHYGRDFVSRLNGIFAFAIWDGGTGELLLYRDRAGTKPLFYSTPGGTLVFGSEPKALFCHPDITPTIDENSLLELLSIGPARTPGNGIFSGMHEVLPGHYQIFSREGTKQVCYWDLTAAPHTDSYEKTVEMVSYLVRDAVKRQMVSDVPVCTFLSGGIDSSIVTAIAAGCMQKDGQTLNTFSFDFAENDKYFQSNAFQPERDLPYVNIMLAHCQTHHTYLECSQSTLYEALFSAVDARDLPGMTDVDASLLYFCSLVARHNKVTLTGECADEIFGGYPWFYRPELLNRDGFPWSADVSARAAFLSGDVTDRLDLAGYSRARYEETISASPKLPGESPEEARRRAVGYLNIKWFMQTLLDRMDRTSMYSGLEARVPFADHRIMEYVFNVPWSMKYQNGVEKTLLRDACADLLPAELLHRKKSPYPKTYHPGYEKLLADHLRRIISDPNAPVYPLIDPKKAKAFLAAPKELGRPWFGQLMAGPQLMAYFIQLNDWMGKYHLSVMNEKKNELQMSEAFLTSIFLAVSGGFQDAYTYNTREEVFSNAQTGNVVLMSQNFMVGRWMDGLRYLFPLLAFAFGVFFAERIQGRFKYAKRLHWRQGILLLEIVILFAVGFIPQEYNMAATVLVSFACAMQVQTFRKVNGYSYASTMCIGNLRSGTAAFSMYLRDKRPEQLRQSLYYFGIILFFAIGAGIGGNLSMRYGIHMIWVSVGCLLVSFFMMFFERVKMPNEKMENLLNLALAATQEEREKSLELDIGYDSAEQTWEVIVKFVGTTEELEALLFKNFPEEYPRIQLTNLQNEYAVLVLPEHLVEPVAALDKIEYMEKPKLLFFAVDNGKRASCITQLQERTGLSGAGVLVAVIDSGIDYAHPDFRRADGTTRIVSLWDQTIPASGGLSAPAGYFLGTEYDEARINEALAQPTEQQRYAVCPSRDASGHGTHVAGIAAGNGRASEGRYRGVAYESDLLIVKLGNQREGAFPRTTELMQAVDYCLRKAQERQQPVAINLSFGNNYGSHTGTSLIETYLDDLANYWKSSIVIGSGNEGAAATHTAGALGMGQAENVEFAVSAYESALNLQIWKSYADEMAVLLIHPGGMQIGPIRQIQGSQRFTLGQTQILLYYGEPSPYSPYQEIYLDFLPVRDYVDSGIWTVRLIPQRIVTGRYDMWFPAGGVLNEGTGFLLPREETTLTIPSTAAKVITVGAYDARFGQLAGFSGRGFTGNGQVKPDLAAPGVEITSCAPGGGYTARSGTSMATPFVTGSAALLMEWGIVRGNDVYLYGEKIKAYLIRGARPLGGGRASGLLQEYPNPQVGWGTLCLSDSLPEMNDIVYQHEVIVPDRGLPFKLFLFEGGGGKYIREKHWHRSIEIFAVRQGQLDFFLNEKKYVLAAGEFVLVNSNEVHAIHAPLPNETIVLQIPLGVFADYYTEEQFIWFSHSGKEDDRQVFSLLEIMFVAYGEKQTGYELKMLSCFYQLEYLLVTRYRKLEVGEEILKNNKQLKRLGRITGYLKEHYTEDVSLEKLAGIFGYSPAYLSRMFQKYAKINYKEYLSSVRLEHAVRDLEETDLAIGEIALNHGFPNSKAFSNLFRKRYGMLPNQYRKTVTSEKERFSSYYLPHKGSRLFLMMTGPVAPRDPEKARAHFYIMRGKEICGLKQGDGKAVQFIYESDGRLANSAQIVGNITDGRILELLGTVKGFRTLVHSIGVSVEMEHPAEKIEFVFQMYGKKDLYGGGTNLVATLQGDGMEQRICLSDYEWSLDDDVPGQIRFTFDQPERVGKADVRFYLNDGFTAPEDLTEEKVDLHSEEYYKMVQRSLMNLGNTYRIRKVIEKARAGKEVTLAFIGGSITQGAGAVPIHTECYAYKSYQLFQKRFARNNNVRFIKAGVGGTPSELGMIRFDRDVLREGEQPDLVVIEFAVNDEGDETKGDCYESLVRKVLKLPWRPAVVLLFSVFANDWNLQERLQPVGRQYDLPMVSILDAVTPQFSGKEQKRVITKNQFFYDMFHPTNLGHTIMADCLEYLMEVCDTSDHARVDSFRQGMTEEEVLEQCLHGEPAIGNSFEKVKLLDRRDGYEGASMREGGFDATDHELQCVEMDQDLCTTPEFPYNWMYDGTKPDRAFFELTITCRALFLIFKDSGEVDAGTADVLVDGEFRFTADPHVNNWLHCNAVLVFQEKETAAHTVRIQMSGENLDKKFTILGFGYVEMVTVKNPILTGFYPDPSICRVGEDFYLVTSSFAYAPGVPLFHSRDLAHWEQIGNILQRKEQLAVGGEEISRGIYAPTIRYHKGIYYMITTNVSYGGNFIVTAEHPEGPWSDPCCLGEEAAGIDPSLFFDEDGRCYYCGTRPNPDGVRYNGDWEIWVQELDLTTKKLVGESMAIWKGAVRGAIWPEGPHLYKKDGYYYLLHAEGGTGPEHSISVARSRKLFQWFEGCPRNPIFTHRNLGADYPVVYAGHGDLVEDQNGNWYVVMLATRRCKNHGSMGRETFLAKVVWQDGWPVIAAGTGRLEKTLEVPLKEYRFPEETGTCDTLCFWETRPDQRLLGIGGRNEASYSLTEKRGVFRLYCGKQTIGEKGCSSYFGLRQKSYHFHAAVRFRFEPQSEDETAGMVLYQNHENHLRMEIGKKGTDVCFRVSTYVHAREEVIREVLLKEEQELWEILIRGEEQSAGIWVRLGEKMICACDKVSLLAYTTEEAGGFVGCTIGMYASSHGTDSKNYADYVSFTCSGAEEMSLETKEYAKRLVEQMTLEEKISQMRYESPAIERLHIPAYNWWNEALHGVARSGVATMFPQAIALAATFDEELIEKIGDVVSTEGRAKFEAYSGRGDRGIYKGLTFWAPNINIFRDPRWGRGHETYGEDPCLTAKLGCAYIRGIQGKDPDHLKAAACAKHFAVHSGPEALRHEFDAKVSLHDLYDTYLYAFKRCVKDAGVEAVMGAYNRVNGEPACGSKTLLQDILRKQFGFEGHVVSDCWAILDFHENHHVTKTVEESAAMAVNHGCDLNCGKAFLYLSRACEQGLVEEKTITEAVERLMDVRIRLGMMEDYPSPYANIPYDVVECPEHIALSLEASKRSMVLLKNDNHFLPLKQEQVHTIAVIGPNANSRAALVGNYEGTSSRYITPLEGIQEYTGEKTRVLYAQGCHLYKDQVEFLGEPKDRFKEALIAAERADVIVMCLGLDAGIEGEEGDAGNEYASGDKLGLKLPGLQQELLEAVAAVGKPIVLTVLAGSALDLSWAQEHAQIRAILDCWYPGARGGKAIAEALFGEFSPCGKLPVTFYEGTEFLPDFTDYSMAGRTYRYTDRHVLYPFGYGLTYSQIRYSDAHADVTDFGILEPVTVHVTVENTGTYPVQEAVQVYVRFSEREAYDPGYQLKGIRSVALECGEKKEVCITLSTRDFALISEEGKCLVHPGSYEIAVGGQQPDERSSRLTGQTVSTLFICKTGNVTEVEYMANTYSDPLDYVVSYQDFFKDTLFESGLGMNNMVITMYADNDTIVNGGKVCNMKEIRGTEVYRYFQDNGLNKGLYFQYDDSRAPSVEPQRRMLFFQKLDFYAENNMEKVLLINIDYSAVNRTLEKMNYDTDVFICQGDKIVLSNGRYSSIGKEFQTFDQTGRVGYCQELEFYGMDLDIYVMQPKRQLWTEIRKNLPLIGFLIVVNAILPLLLVRGFNRSFTQRISELSKVFETVGGEHLVPISYVRGKDEIGSLMSNYNRMVARTNELIQIVYKNKIKEQEMLVERQNAELLALHSQINPHFLFNALESIRMHSLLKNEYETADMVEKLALMQRQYVEWGNDSVEIRREMEFVRAYLGLQKYRFGERLSYSLEVEEDCLDIKIPKMTVVTFVENACVHGIEAKTAPGWIFVRICQKQKALYLEVEDTGCGMDASQMQELKERMLNASIDMLKDGGRVGIINACLRLKMVFGEQVAFDIEGEQGVGTTVSIRMPLMGEALLKVLLVDDEPFILQGLKILIDWEQEGFEVVKTAANGEEALEYLRGEQVDLIIADIKMPVVTGLELLEKIRGEKISDAHFVILSGYADFEYARKAIRYDCTDYILKPVDREELLKVLNKVQVLRRADNQKKQSSREMEQAYLSRHLIALIQGKFDSVNLEYVKSHMDGASGIRYVEIQMDDDGRAEEISDKEKRGFQRQLYQYCIEFLGPHASHCVFDVSTHEKIYDIGLLYCDAFAKEQGIDGKTYLNRFLEYLIANMHQPVIMLVGKKVQDISNIARSYGNACMLRSFQGFRAKKPIYYYEEEVQVTSGGIVLCKSSLDRLLKAVEQNNHVEIRSAIEQFYGEMISREMTGETMNLNINYLLFQLIHLASEQDDGVNQEEILRLISESSFEKGVMRGSKAHLTRFACEYGDYLSQLRKNVSRGVLGEIEREIRENYAKNITLKSLSEKYYVNSAYLGQLFRKKNGQSFKDYLNNYRMERAADLLLHTDKKIVEIAEEVGYHDLDYFVNRFILVKGCTPAKFRREAMKRRKLISVLLAATMMAAMFAGCGSDAASTDAKENADGADSTEAGGVKEFTAFFAVPGSEINDDNEIQQIIADKTGVKVKETWLTGQTAEEAVGMMITGGELPDFICGGSGQSQLYDADVLVALDDYLDDYPNIKNFFTQQQWDQLRQDDGHIYWIPQFSNIKGEEKVCTHNDEAFWIQARVLKWADYPEIRTMDQYFDLIERYNEANPTMEDGTENIPYTILCDDWRYFCLENAPQFLDGYPNDGSCIVDPETLTVIDYNTTDTAVKYFQKLNEEYQKGIVDPESFTQTYDEYIAKLSTGRVLGMIDQWWDFAYTAGDAIKQAGLDAQGCDYIPLPITIDESVKNQWHCSGGVLNVSDGLAITTSCEDVEAALQFVDDLLSQDIHNLRFWGVEGVDYNVDDNGEFYRTEEQRTRAVDTAYKASHTCTYSYFPQYSGTSDDGINANKPDGQANEFFDGLNDDVKEAFSAYGAETYVDMIGTNEAPGAWYPMWSYSNSFTTDTEGGMAWNKIGEIKHEYLPQVVMAKDFDAAWAEYMDAYNSCDPGAFIGELQTELDKRMEEAAKYEMALTRTRSKEKENQYKAKITWKEIKRQKVLLFWSGVMVIYGIIFYYLPLAGWAMAFQNYKPKLGIFHSEFVGLQKFQTLFSDMTFIRVIRNTLAMGVINLVVTFVTAIAFAILLNEIKSHGGKKVVQTISYLPHFLSWIIVTGILHDMLSGSGIINEILMNLHVITQPINFFAHPNYFWPIVAFANVWKETGWNAIIYLAAITSIDPSLYEAASIDGAGRWAKIKYVTLPGIKPTIMILLLMNVGNVLNAGFEIQYLLGNGLVQKVSQTIDIYVLKWGISQGDYSIGTAAGIFKSAVSIILIVIANQIAKRNGEERLFMQQLAGANKKRKRTGSVDAFPIVNGIIMLVIVVITLYPVLNTLAISLNDGTDALRGGIYLWPRKFTWKNYITVLQKDNLITGAYVTVARTVIGTVLALAANAILAFVVSRKRFLFKRSLSLFWVITMYVNGGMIPTFLLYKGLGLTNSFWVYVIPGMVSAFNMLVIRTYMNGIPDSLEESAQLDGAGYTTIFLKIYCPLCKPVFATVALFVAVGQWNSWFDAMLYNRMNSDLTTLQYELMKLLSSVTNQGTSAEAMKNAVGTVTPTSVRSAATILTMLPIICIYPFLQKYFVTGLTLGGVKEMKKRLAEGMTLMVLLLVLWNMAAHTDRMAEAQIKHFTAFFPTEGNSLEYGNIMKAKIAEVTGAECEELWLSGQTKEQALNSYIASGRYPDFIQGEKNLYEAEALIPIDEYWEEYPNIRQYMTNEQWDMLRQEDGHIYWIPQFGVTNGKSSDVIHDGEAFWIQTRVLKWAGYPEVHTVEQYFDLLEAYVNANPMMENGTRNIPFTVLSDDWRYFCLENVPQFLDGYPNDGCCMVDPQTFQVMDYNTTETARAYFEKLNEEYRKGILDAEAFTNSYEEYLNKLSTGAVLGMVDQWWQFYYAIYPAYDRQKLSEQGCDYVPLPITMQEGVENQWHVERAASIDTSSGLSVTVSCEDIDGALQFVNDLLKPEVEILRFWGQEGTDYCVDEEGVFYLTKEQSKRFSDDLLASDYFCYYSYFPRWEGMLPDGKNAFSLEYQPAEFLKSQLGDIQKCLRAYGCESYVDMIGNHKAPGNWYPMYSYATSLSDTTEAGMVYEQINEIKHEWLPRVIMAEDFDTAWQEYMDAYNACSPQILMEDLQQEVMRRICRMGTELNQALVQQALSFAPEITEERQAVKVWEDGTVEFYLYAPTAETVEVAGVGGYFDAAPLALLPDGNGGFYRKIENFPRGMHYYHWFVDGVKLFHPKAGFSYGCFETINTFEVPERGAEFYYLKEVPHGTVHLAKYASGVNGHLKECYVYTPYGSQKDPSRRYPVLYLQHGVGENETGWIWQGKLNYIMDNLIAEHKCREMIVVMSCDYAFIEGEEAVFFPGDFDRELMEDLIPYVETHFPVKRGRNYRALAGLSLGSALAARSVCRHRDKFSALGMFSGVSLYDAERICTDEAEKPDVVFFSCGSREEEISRGIEDICKKMRESETLCVKKVYEGYHEWHVWRKSLRDFVPLLFCGAETVEETASACCMERRLDEKQLSVQSMEEQMLFFDPVHRQIRFETDAQGRPAGKYPKTIPGVKVCSDGTAEFYLEAPGAARVDVRLKEKHEILAALTEQQPGIWRGKIGGLSAGYHEVHFIVNGVETIHPEVPAGYAGYNGQGSFACNYFEIPEPEFCYPQLANVPHGMLHMEWYREEENGGYRLCYVYTPAGYEKHAKQRYPVLIVESFRWESECVWIHQGKIANMADRLIAEGKMTEMILVMQKCSKRKEARIPEEIIQKYRVIPGEEHRAMIKAQDGSDWTSRRHQLAEQLKNSFRMEEIIFWMEEAADSGVKKIADKVAGDVELVTDRRPRVLYGTSQEELADVAERAETVIVPATVGKSRLLEQMEEEKRIGLEQIRGKRECYGWFFLNDPEWHGTQILLIAGSDKRGTIYGLFHLSELLGVSPFVDWCGIRPPHREHVGLRASMACVAGEPSVRYRGFFINDEWPAFGTWCNRRFGGFGTSVYEHVFELLLRLKGNYLWPAMWSARFGDDGPGLANAKLADEYGIIMGMSHHEPCLRQGEEYKYLRGKDSVYGDAWNFRTNREGIIRFWKDGLLRRGKFENVITLGMRGEADTAILGEKATLEDNIELLRDVLKTQNELIRECVDEDVKRVPRMLALYKEVEAFFYGNDQTAGLMGSEELEDVILLLCDDNYGNLRTLPTKEMRTHKGGYGMYYHLDYHGWPISYEWINSSYLPKIWEQMTTAYEFGVRELWIVNVGDIATQEFPLSYFLDMAYDFGRWGSGAVNQTAEYTRQWTRQQFGSFTEEIQEQIADVLQGYTRLIQKRRPEAMRAMVYHPVHGRETQDTLEEIKRILTEAERVYAWVKEHAPEYEAAFVALIYYPAAGTLNLTRMHLLAGMNQYLAKLGALHANDYGDAVEQCLKRDRELVTAYHQMDHGRWNGMGASEHIGFVHWNEDECLNPVIHRVLPADKPRLVVTVDQTMQHAEGSPWLTESMKLPDFLDPACRSAGITLYGLSECEAAYEVTEKPEWLSVWPMQGVLDGKKHNYEKLELVINRERWAMNRDGNTGTSACGVLEIKTPSGCCRIDIPVCENLPEVQEGTFVDTAGYIVMEAEHYADRKDGYAADGKREGKNEKVRFQCIRDYGKTRSAMKAFPVTAYGVPGENAPYLEYHFWVSKPGGYVLTLYMQPSNPVANDQKLCYGVQNNGGEIRIYNAVPEGYRIGDQGEFWAKGVLDQIRRQEIPVSCRSGINRLRIYSVTPGFVLEKLLIRPEGTDVPESYLGPKETYHTMAGAFETGKYRNVFAEYGYPEAEIQRRVEQTFETIFYGNEEERFYHEVGADMAYIEDTGNHDVRTEGMSYGMMACVQMNRREEFDRLWKWTRTYMYIEDGPCKNYFAWSCATDGSKNAEGPAPDGEEYFAMALFFAADRWGNGTGIFHYADEARAILRECIHKGEPGHPGEPMWDTSRHLIKFITNCNFSDPSYHLPHFYELFARWADEDDREFWRGAAEASRAYLHLACHPDTGLSAEYAEYDGTPHEGDQEIFGRHDWYYSDAYRTIANIAMDWLWFGRDPWQQEIAGKLQSFYCEKQSGHWDGVFLTDGTLLRERALHPVAVIAVNAEASLAAKGENAKECIRRFWETPLRTGERRYYDNFLYLFAMLALSGNYRIYMKYGYFDETKKEYVITRPDTPAPWVNYLGSPEYGAIISNNAGGYSFAKSGANGRILRYIFNQFDEPGRYIYIRDNKSKDYWSASWQPVGKDLKTYRSECRHGTAYTKMQADYSGIHSEVRYYVPLDRAYEVWNVCIANTSAEERELTVTGYAEFTNNSNYEQDQVNLQYSQFITRTVFCGDHVRQMIHANLDQIEEGSDVDDKIVVSRFFALKGAKVTSWCGDREKFLGRYHGYGNPAGVAEGTLCNEGNENGNSCGALSTVVRLAPGEHCEFAFLVGMKEEPEVAEILASYALPEQVCGKELQQLTDYWHGKLAHFQIKTPSEEFNAMINTWNAYNCFMTFIWSRAASFVYCGLRNGYGYRDTVQDIQGVIHLAPEMAVEKIRFMLSAQVDNGGGLPLVKFTHNPGHEDTPDDASYVKETGHPAYRADDALWLFPTVYKYIAETGHLEFMDEVIPYANRGEATVYEHLKRAIDFSMNHLGKHGMPAGLYADWNDCLRLGKEGESTFVAMQLYYAMNILRKFAEYKQDKETASYLDEKQEELGKLLQELCWNEDRFIRGFTEAGEVIGKRTDPEANMWLNPQSWAVISGLAKADQADMALERVYEKLNTPYGAILMDPPYHAHAFDGALAVIYNPGAKENAGIFSQSQGWIILAEALRGHGDRAFTYFMENAPAAQNDRAQIRVIEPYCYGQFTEGKASPNFGRSHVHWLTGTASTVMVGCVEGILGMRPDFYGLHLTPAIPHEWEEFEVNKVFRGCQLHIVVKNPGHVQSGCDRLLVNGVRMQGDYIPQEVLKKQTEIVLYMSMGKIEFLDQQGSFRVYQPEDYSGLYFPLAGDGGLKSCITPTLGGDSKRDQNHFLMEPVSIENLHNNKNTRNFWCRIKNRGYWSACGSSAEAEFLRFTGEQEKSVLEAGFMWQKLTRTSAVHGLKAEITSFVTVDGAMEVMMTELTNITEEPLEMTPIAVMPVYGRSADNIRDHRHVTSLLHRICTTDYGVEVTPAMSFDERGHQKNHTTYFVYGSTGEGEAPAAFYPTVGEFIGEGGSYLIPEAVRTEKPGAVAGSKAEGKEAVGALKFAEILLKPHETVCYLTLGGMTDERSQIEPLTASLRQRSQVKEAYDEVKRYWTKKVNITFKTGNPDADNYLKWITFQPILRRIYGCSFLPYHDYGKGGRGWRDLWQDCLALLLMDPSAVRQMIIDNYGGVRVDGTNATIIGNAQGEFIADRNHITRVWMDHAFWPFVTTKFYIDQTGDLEILFEKVPYFKDLQSKRGTDHDTGWDETYGKCQRTEGGVVYFGSVLEHLLLQNLCAFYDVGAHNEMRLHGADWNDALDMAWENGESVAFTSAYAGNLKEIAHCIRLLEQETGCKRFEIAEEMGMLFAGGRELYENVEKKRGILDAYLEKCAHNLSGQTMIVKAEQICSNLEEKADWLMEHIRVQEWIAEDEAHGWFNGYYDDHKNPVEGCKDRKVRMMLTSQVFAIMSGTATPDQIRKICQSADKYLYDEKAGGYRLNTDFGEEKMDLGRMFGFAYGEKENGAVFSHMAVMYANALYRRGFAQEGNKALQALLNAAMNFDNSRMYPGLPEYYDLSGRGMYAYLTGAASWYLLTMVTEVFGVKGVMGDLVIAPAFMPEQFDAQGNAEVKLIFAGKKFDIRFSNPEKCECKKEWIKSVLCDEKQLEPQAGAAYAVRIKKEWIKQLDAEKEHVIKILFGRMVFTGGIHGSSGVNNIARSTACQIPGEKQLEHSSEKNARISSSQSFAADSVSLPRLDTLAGACPTHRRQWVDFLAALKLTLDNDTFENTGKSRFFERRTSRVLYMAVFRVERNKGYTVMSNHHLRNKELSLKAKGLLSQMLSLPEDWDYTLKGLSLINREKIDAIREAIKELERAGYIVRSRERDEKGRLRGADYVIFEQPQPPTPDLPTLENPTLDNPMQEKPTLEKPTLENPTQLNKDIQRTDLPKKEKSNTDLSSTHSIPILSPNPSPCREAAAPPERKGTEAAAQSAVDIYREIIKDNIDYHILKQDMKFDSDRLDEIVDLMLETVCTARKRVRIAGDDYPAELVKSKFMKLDGEHIRFVLDCMRENTTKIRNIKQYLKAALFNAPSTIGNYYTSLVAHDMASGALSPKKPQYGDPDYYSCNEGESLMAQKMTGALVFDERTDRYDIRFDLNSYYGGLHCGECFDVFVRGKWKPTRIEYGDNWYLVGIRAEDLNGLRVRIMQDEVNEKTIALYIKTGKLTAQTLQKAMKAILSKGKKQLAKPPQGKQSLKQLMKQNAGVSNIEITEGNIKAFESTAKKYGIDFALKKDATESPPRYLVFFKGRDADVLTAAFKEFSAKKLTQEKKPSIRKLLSTLKEAAQGRNAERAKVKNKDREVSLMKPEIKKLLILNLPYLLFVWLFDKVGAAVRLSPGADASAKLLHLGDGFTAAFSSIAPSFHPADLALGIAGAVIVRLIIYTKGKNAKKYRRGTEYGSARWGGADDIKPYTDPVFENNIPLTQTERLTMNSRPKQPKYARNKNILVIGGSGSGKTRFFVKPSLMQCTSKDFPTSYIVTDPKGTLILETGKMLQRYKYRIKVLNTINFKKSMKYNPFAYLRSEKDILKLVNTIIANTKGDGEKSGEDFWVKAEKLYYTALIGYIWYEAPEDEKNFTTLLEMINASEAREDDEDFQNPVDLMFERLEEKDPEHFAVKQYKKYKLAAGKTAKSILISCGARLAPFDIKELRELMETDEMELDTIGDRKTALFVIISDTDDTFNFVVSILYTQLFNLLCDKADDEYGGRLPVHVRCLLDEFANIGQIPKFEKLIATIRSREISASIILQSQSQLKAIYKDNADTIVGNCDTTLFLGGKEKTTLKEISEILGKETIDSFNTSETRGRELSHGLNYQKLGKQLMTEDEIAVMDGGKCILQLRGVRPFFSDKFDITKHPKYKYLSDADPKNAFDMEKHLKRRPAIVKPDEVFDYYELDAADLQEDADHEETMRKRSAEEKQKQLERFLMNVAEAADAALWEYWREKEAEHRRFATEYVTRRGLIPQQMAFFNSAVDVLQTLVVALGAGLGIWGVINLMEGYGNDNPGAKSQGMKQFMANMHISYKPLWHTLLERDMRKEDLRLAAGMTTNMIANMSKEGKHISMDTLARICETLNCEITDVIELVPDEPASTGGKEHERIETKNNGKRNMRELKPRITENGIDYILVGDYYIPDLKLPEEHRPIGKYGRMHREYLREVHPARLNTLILTGELWTYLADLNEQAQERLDTIMEQMKATEGVTEELKRTQQMEWVQRCNNIHNRAEEIVLHDIIYSYGSNMIEIVFGESACGSLKIAQTYGKGKYRGSAVSVFMRHEDGSVPSSDEMKEAQIQAQEQEHIAWENAIPLGGKSSDVYCFDMALSVGDISDNGIGEQRKNVLKKMLSVWFVEDLDYQVEEKIQKIKTTLSSVIERYVAGEEVRIWYSYNPDELCGMYWLMKQLRPLNCQTTIYLVKLPAWEYGKENTMTSKIAWGEVSPGEWGKYITLQEKAKPVFLSACAMKWNQLQNENAPLRAILNGKLQSVSEDIYDSFILREIAEQPEQFKMAIVIGNVLGKYQLGISDVWISNRIDKMLEDGVLEIIQDAPKGETNYRRILRKRMKMKGATSIQERLWELRKDKGLNLEELSKLTGISKSALGSYEKEDFKEINHGNLITLADFYGVSVDYLLCRTENREQINTPLTELHLNDEMVALLKSGRINNRLLCELATHKDFIKFLADIEIYVDGIATMQIQNLNALVDTVRHEIIERYRPGEDDPHLKVLQAAYISDDEYFSHMVLDDLNLIIRDIREAHKKDSESAPQTTVADELKENLEAVENFKGSRDEKLVVLYCKQLGINYKNLSDEEFRWLIRILKKSKKMGTPISQRKKRMPRMSKKRKHELSFYLNDRGRVTYNELCRKCQHGCKQSFRAVVIDCPRYLSKRAKKKEEHTEMNFEFMTIDTPLPPCMPFPRALTGFPVSSTAKVMYCRMLDAMLSKGQEDENGILFVCFPVTALAAVLSRSSMTVKRSLNELETAGLIMRVRQGVGEPNRIYVLIPGKEDAALAMPDTSKLEKINRELEKSEKKLRKAINDEKALQHQLKQLTRKERTHRLCTRGGMLESFLQEPERLTDDDVMLLLKLIFHRQDTQELLKKLLEREKLETPMKKYQCPCCGYFTYNVPANEDCGYICPVCFWENDPFIASDNEPSDSNHGITLKEAKSNFSKFGACEKEMLCYVRPPRDDEKKISMKDTAKRAIVTVIVFVIIYVLSGPIIGYTNYDMYLKGIEFLSAVIGAGCYWIGSNKKMKRIGTALTIVFIIAGFAISFFIGHYVSDKSHTESRAAQFDKYISRAIDTIKDKGLSIDGAPEAIASNIWVAHEFCDSPEISAELSNLWNTIVYEKDVLLGQEDVLTAQLKDILEKCQMPCPHNEITIVQRSQRQSAVAAAAYQSGEKLFCEYDQQVKHYPEKRGIVHNEILLPANAPQEYADRNTLWNAAEAVEKQWNSQLARRWVLTIPRMAKAVLVIDMPERCTKCPLLLTIPQKGGLALCLARPTNGQEEYNPKNEKTWRPDWCPLRELPERSDHPEHCDNGRFDAGWNACLDEILKMLANHHFDDDKENFDLLIHNLCKEVQQIPTAYDVDAVVEQLEERSEEYNSGVRLHGKPEEMLTDEAIEIVKGGGVDGMTENEAIERIKYRMHTVEQVAGKGGMEDLEMAIKALEEVQQYRALETRLAEMFGGALCLEIVIDELERQLKEPDNPHPINAKILTYEDAAAWDAYHAIGTPEECRAAVEKHQRAKNLIFDKSLMVLSCPTCGHYAQEVVDGDGSTRGNIPKYCSRCGQRLDWGTSDETGMDFFCHCVVDASTICQCTGLKDKNGKLIWENDILSGHIDVEFPEDETRERVVWHENGWCTSEPGYDDYEELDDFDSENFEVIGNKIDNPELLEVMIECMRTVARKPEFGQWIPVSERFPDPETEVLILARRKYRSGGQADIITTAMYENGEMSERDSCWNWVDIEGEWDEENECYIIPKGWWENKHYNPDDVYNNPIDDEVIAWMPLPEPYREMTENEAKIFIQNAMEQSKNVLAELMLIMPKVFAAKKRTWVSITVIWRTAKKKLSHARWRYGHWKMCRSIVHLERQRKYPESMAYGYKNLSKAQEDAIRVMKAHGNTLIKIHGFWTYENCEFHEYHNGSNLMKFPIYNCRTTTLRVLARKNVIALDEDKGICKLNMENRFLFRGKRIDNGEWIVGSLIVDKHQHIETGEQIEIIGIYPSEYKDFSKRIDPSTICQCTGLKDKNGKLIFENDILSGHIDVEFPEDETRKRVVWHENGWCTNEPGCDDYEELDDFDSENFEVIGNKIDNPGLLEMERLTERNPLWIDDELWERACEPDCEEIDAVYRKLKDYEDAEEQGLLLRLPCKVGDTVWVVTSPFNVFDGIEYDENMKDEVYEAFISSVTFYECGEQYRIYAKATNHFIGAYFRKCDFGKTVFLTKEEAEAKLKEMEGEHGEMPKCKNCNNLYNLSNKDDVIVGKWCPKINDSPHLDMERNCEHYKAMTNADRIRSMTDEELAKWFDAVTKDILGGSTWDKKGWLKWLKAKSEGMRGKNSTALHVKNIYVTSTEIKAGIHFAMYVVKKLIGDKDTEGRKKDAEVMAEISEKMTRPSKHVSSDALKRFREVPYQLRCRKEQGKMERRKRTSMYDPYREDIVAALETGKTIRQIYDEIIRPALNGGCEYSGLVYYVNKNGLRYVTENDGYEPVHICAKCEHCGQIQRERFDPMRICKTAEREVLAVVKTSPRWCPLRSRNTGGEINAMKDSDVCPLCNGTEWILTEKDGITTAVECKCRERAAMSRRLRFADIPEAFRGMDLKTFRTDVYRQPDSKKTVADACRIIKAYLEDFGTQREQGMGLFIWSRTKGSGKTRIAAGIANELMKSYAVKFAVSLTILQEIKNTWRRDAEYSESRLLDALNTVDVLIIDDFGVESPAAWINDKMYQIINERYINKKVTIFTSNESLDSLRYDDRITNRIKERTYQIAFPEESVRDHIAERNQEEMIEKVMRGQGNGEKKKNEHVMEFAAAYPKKCTGYLSESEYCNAVMAGVPEDDLIRAAQNYADACRRDRTAERYIKKAENWLRENVFMQYLKGAGNGADGTNAGENTTAHEKSINERLGELGDTGEFEGFMYHSVNHKVYHKPNHRAYHSVNHKVYLLLNINMEYKFTIKLKPITKKNSQQIVKDKTGRPRIVPSSAYKKYEKQCEKFMPDIETIDCKVNVKAVYYMPNNRRVDLTNLHEALHDILVHYGVLSDDNCKIIVSTDGSYVDVDKWEPRTEVTITELEEGMEELKVTEYRGMRVLTTQQIAEAYGVEAKKITDNFNNNKSRYVEGKHFICLDGEELKRFKSETENLGFARNLNKLYLWTKKGAFLHAKSLNTDTAWEVYDRLVDSYFDHSNLLEGMSPELKAALIVDKRVTKVEHRIDHIENDMPLFGAESDELSAHIRRRGAELLGGKKTEAYLDNAIRQRVYRDIYNQLRREFGIYDDEGKMKSYKALKRKDLADAHEFVDCYTLPAYLAEQINDCNAQMRMGGADGVMKRLWSVFTDDMEHCYFTGAVPVERHHIFPGNPNRKNSEKYGFVIPLRPDLHPNGTQAGKNAAEMDLKLKQMAQEYFESHYGSREEFRRIFGRSWLMETTGKLTGASRTFDGRGIILTFEVDASAAGQIENLQNQDKLKIKAVRYTQKRSLDANAYFHVLVGKIADVLTISKAKAKNVLICKYGQPEYLPDGNIFYYQSNAPEEYMWEQETIHAMPVRYDGKLTVYKIYRGSHTYDTKEMSVLIDGTVADAKELGIDTITPAELQEMKERWGIMAESARKMNIYEAISRCMEEIGAVGKDAVNKQQGFKYRGIDAVMNAINPALVKNHVFIVPEVLEQQRQERTTNKGAVLIYSICRIKYTFYAEDGSSIEAITVGEGMDSGDKATNKAMAIAFKYACFQVFCIPTEEMKDPDGETPEPVAPAPQFTPATAEQLHKINRFVDAYAEMCENANAVDIVNQLKKMYNFSGTSDISTELANKLIKQVETWYKKRKEADAMQEINLLVEQKNGSIETNSEEIKAALAAKMEEYKGMVFTVESQPEAKRTVASLRKLKKAMSDRRIEIKKTFMAPYTNFEAQVKELDKLIDEPIDFISGQIEEFERRRVEAKKAMICEIYTGIMAEHGTVMEYLPLDRIYDSRWENSTTAQKAITEAITAHVEHVEKDLDTIRAMESEFEDKGLAKYKATLELSDAIATMNQYQKQKEEILRRQAEGEQRKAEEEARRAAEEEQRKAALVHEEPVVPEVVPDVALEEEKEVRSAPAPAGTVRYEVIADPFQIAQLESAMREYGIEFRRVMIEIAPDAPDWDEYEAEQARAQRHRKKLAAIYDRDERFREEKEIEDAGNMKARLCNKDMCNLVDVLRELPETLEGVGIAGIATITVTDDGSISGVLAVSPETAVRLKISDNGDKGEWEYIDDMYGKYQCRCCGCMMDPGEGRNGMCDDCVTGETERQRREEKMERMTRATEWTQLEVEDFLNESKVMMTEQEKQEIVSEVEKQILEKMKGTVIREDTQSVLKKPRSKWFTSASCNTESIMYKLFGTYVYWSVWDMIRKLTCYICGTSYVRNLSGNEMADEVAEKLCQFVYDLRTEYLEHEAKKMEFQNNGIGEVRTLKRIGKIVTAVGVVTALLAGCCLDSQDVYGYLAGALCIIGGFLGGAGYAICMLAERRRTEVVIEMDKPDIVWIEIEEVGRMPEELQEMKVTNDQLEKIARLIVGIAAVPEFSNKKIPTSLVAKIYGKSESWVRNGIIEGWLPIGHGTCSENRRNVYVSPKKLWEDTGYVWQGVVDMMYLLIVFLGIVILKFVLNLSRLIGTLIMFKIFQNQPKNIAQYCPFVTSLFNSAGTQQIILSATRASGINQAQRDYISNSLSRQDTRSELETIFQKTIGVYKFRMLQTINPFYWLFLPKFILEDFNVVLPKVGQTLLNLFYWVIGFVGTYFLEKYLDAHSQDFFQHIIDMLPMELANLLYLCMREVREFQEIILKYAYPRIIRSLSIKFFLIKKLTKREFVAKTEKGGMPDFKDMLKFFRMREHLSQSELAEKLGISASTVSMYEVGRRQPDFETEEKIADFFNTDLNTLRGRDNESEQPAYYLDKESSDTAQFLFDNPEYKVLFDASRKVKPQDIQYVADLINRVSGNSDDTGCMALDNVRTVYCDLPNTVGGFTVATPDDFFTIVLNQNLSYDRNVQTYKHELEHIKNGDFDKTCSADIIEISAHHMNGITKTIKFYKFEALPSLSNNGITPMTTIEVLNAVFAIGESYNVNYDKEMYTIDILELTPNYVFGKCAKENELPITTFYQTRNKHTNKTKPYSSISPDTQLEVYTFFFIDCCMNRMSALQHKSITKIQNILSAAIWQLSKGTLEVFCAPERIKDIKHTAAKIKRNRKLAVSFAPNAISKYNIDSLSKELGGIKYDSFSIELKLSPTTTDAQVNHIYDNYQNNKESFNGLKLIGKTDAGIEETIDFIETLFTHSTNFEITEDTIKNYDIIKKKLSEALSIEQMKNILGFMRYHSCIIFPLLSGILTYFFYQKFNFLNINDTDKITFLASLDASLIGVLITILTIYLAVPKSDFVKKRLKDSKHERIYLCNILIGIIVLFVSILSWIFFDNVKLLVILFIAGISNIAISIYYTFSLINLIMKLPNGYGSITKLTGNRRKPWMARVTCDETYDETKHDYVRKRIVLGYYPTKKAALEALSIYNESPFKPEDVNITFSQIYEKYKKSAAYAKLKSSALTSRQTAYKYCAPLYDIKIRDLNKDMLQNVIDSIQLGSSSKKNVLTVMRIVIDYAYDHNLINKKYTDGINIEYSDPVIDRIPFTEQEIETLWSVSDDWDVKVLLILLYSGMRVNELLKNYRDNVNLEDHWIYVPAELAKNKESCRYVPIHNKVYDLVKWFVDNSASYGHDKLMLNPNGSVIMYNNFVSRNLPRINKFMSVEHKFHDTRHTFASKGTSAGIPELYMQKIMGHTPRSILYNTYTHITIPELLEWINQIPMISAGDFRNGITIELEGNIYQIIEFQHVKPGKGAAFVRTKLKNIKSGGVVEKTFRPTEKCPTARIDRKDYTYLYADGDLYNFMDAETYEQIALSKDDIGDALKFVKENEMVKMCSHNGSVFAVEPPLFVELQITETEPGFKGDTATGATKPAIVETGATVYVPLFVEQGDVIKIDTRTGEYLSRVMKIAIGNDHAATELKFVIMDYLKELGHEVINFGTDGTESCNYPEYGEKVGRAVVAGEADCGVLICGTGVGISIAANKVNGVRAAVCSDTATARLVKEHNNANIIAFGARIVGTELAKDIVKAYLDAEFQGGRHQTRIDMIHEIERHNAMLERFYPGEYVDSTYAIDFDRLYEEGYRGVIFDIDNTLVPHGAPADERACALFAHLKELGYHCMLLSNNKEPRVKMFNDAVQVSYIYKAGKPNPANYRKAMEQMGTDEKNTLFVGDQIFTDVYGANRTGIRTILVKPIHPKEEIQIVLKRYLEKIVLFFYRRKCQKQQSAAQKQMNLSGIRISAGFYDYNSIENQTVTVGSELPAELPQSVTGQAPSTEEYTAPAAIRKSGPDQGAIDYANSYQPDAVYELKGVDSDIARLDVERAISDMRKDQVLEQYQFFVGTNPDEAQPVRPDENFILMKCPFCSSENTRVIDSRPADDNNSIRRRRLCDDCGKRFTTYEKVETIPLIVIKKDNTREQYDRSKIEGGVLRACHKRPISVNQINQLVDEVETEIFNREEKEIPSSLIGELVMDKLKDLEAVAYVRFASVYREFKDVNTFMSELKKMLDKMRFCDLARKEVINVNDCKCLGNVRDLDFDECGGCIKALIVPGPAKWMGCMGREFELFIPWCKIVKIGPDIILVDIDEKEAKHKVKMKLGIVGLPNVGKSTLFNSLTKAGALSANYPFATIDPNIGIVSVPDERIVKLGELYHTKKVTPATIEFVDIAGLVKGASKGEGLGNQFLANIREVDAIVHVVRCFEDTNIIHVDGSIDPARDIETINLELIFSDIEILDRRIAKIAKQARMDKTLAKELELVEAVKAHLEDGKMARSFEVPDDEDAQIWFKGYNLLTAKPTIYAANVAEDDLADDGASNPHVAKVREMAAEEGAKVFVICAQIEQELAELSEEEKKEYLDDLGVESSGLDKLVAASYSILGLISFLTAGEDECRAWTIKKGTKAPQAAGKIHTDFERGFIKAEVVNYQDLLDNGSLAAAREKGIVGMEGKDYVVKDGDVILFRFNVMPQDSCEERWSAEAQDGFWENGAAVKAVYSKKPVKRKMNYKVVRTETADARIRKIILYVAENFGMEVALEKLEELERNLLDLGKYPQKCVELRYLVLKRQGYKVLVLEKNLVFYKINEEKQEAIIYAVVDHRPDYLNIIRGLMKDRSFSRKIESERSFFVSEGHRIRWISGEVYSMYSRKVILWRQYGRRMDKLLKLDPGNTELLAQKQKLLAAGLEMRFLSKERHILMIYDIVISDQAEIDLRGILEYIAFELQAPENASGQLDRLEACIMDLDHMPKRYRQYELEPWKSRGLRVAPVDNYLILYIPDDDTQVVTIIRVMYGGRDVDTQLNRFTKTKMATKSANVYARIEPDVKEQAEGILAALGIPASNAINMFYKQIILQRGLPFEVKMPSARPVDVSALSEAQMNAELEKGYADMQAGRTRSAKSVFADLRKDYNLMRQFDYTKKWKKMLTPEIVRYLTTIHEYKGEQRLIAEHHADVLESLVEVAKIQSTESSNKIEGIYTSDECLKKIVLDKTMPKTRNEREIAGYRDVLNTIHENFPHIPIRKSSSNRSPDDNTFIFASLRTTGDMQKVREGRGTDAACMLDYCTQIEEYAERAGDARLLGFSHYYKGRTYYLSNETGKVFEEIGEALGYLEQSGQWELVAAAYNLMAIVSVGKGNLSFAIEYYLAGLKYCKKYELIEVESRIESNLGSLYMECGQYSDARDYLEQAHLDYKRVPEEERSLASLTAIYNNLALCYMKSGSLEKAEEYIRKLETECEAHFEEMDYIYVNCMRARYCHLCGNISMRDQYIADIQNQLSGDVLILDLFDDLYDFCELMLEIDRGDVCRNIGEKLKALVEQTGIANMQRKMTALEMDYVKKTKDRERYLKTAGRFYELTEIVEQENRSMIVNMLYLRKSLERARERCRKLEEDAVELTEKSERDPLTGLANRYRLTNDSEKIVEQCFAEHKPLSFEILDIDYFKQYNDRYGHQAGDDCVRAIAALIRQMESDQIFCARYGGDEFVIIYSGMSAEEVCERAEKLRQDVMALQIEQRYTEGAFGVTISQGICHDIPSNGNKNWDFLHVADQALYRVKRRGRNRLCMTDIHGREIEVMKFDFTTIMDRKGKDALAVDKIPYKDVQVQEGFSVLPMWVADMNFATVPSVQKAMTDRIAHPAFGYFEPREEYFDAIIRWHAKRNGVQGLTRECIGYENGVLGGVLSALNVFCSRGDKVLVHSPTYIGFTFSLKNNGYEIVHSPLVLDENGVWRMDYEDMEKKICENHIHAAIFCSPHNPCGRVWERWEIERAMEIYEKYQVEVVADEIWSDIILGDHQFVPTQSVSEYARMHTVAMYAPSKTFNLAGLVGSYHIIYNPVIRDRVKKESSLSHYNEMNVLSMYALIGAYQQEGYEWTDELCKVLTKNAEYAYDYIRSHFKGVQVAMPQGTYMLLLDCTEWCRKHGITIDELQKRGASIGVIWQDGRPFHSPCGIRMNLALPFSLVEEAMERLRKYVFVMKKRGPLLAAFCIPLLITLIICVNREIYPFGDQCMLHIDMYHQYCPFFTELMEKLKTGGSPFYSWNIGLGADFVSLYAYYLASPLNWLLILWPRGYVIEFMTVLSILKIALSGLTFTYYLGEHFHVWQDAGNAAAVTRTEKKTAVRLPADVASYAAALCGAAYALCAFMAAYAWNLMWTDCMVLAPLVILGLERLIRDNRPGLYYVSLAVCILSNYYISIMICIFLVLWFLLYWMEHRASGYRAWIRFAWYSLLAGATGAVLILPTAKVLSLSGASGISFPETMEWYFNIVSELARSLLAVDVYTGDSHWPNLYCGIFALFLLFLYVWNRAVPWKKKLPRLALVVFFWLSFSNNMLDFIWHGLHFPTSLPGRQSFLYAFLVLVIAYEALLYIRELKLWQVFAAGGMSVVFLLFCNHFMDETTMEQTSIWASGAFFACYFVIVLGILIGKKRIRQLMLATGCLAVVAELVINYNLTGLDTISRTDYVKNLADYRAVLSETAEKSDEDSVFYRTEELERKTKNDAALSGYHSGTQFSSLMNLNVSHFYQDVGMEGGKNFYCAGGATPLLSAMLSIRYVLADNAMEEGPLRTLVAQRGDTYLYENAYVLPLGFMMDEDVAEKWDYAGGGDIGTQNQLANLLGSDRLLLTAVESESKAGESSFVAQDSAYYYATYSKTGVDNLQEQVSSGRTRGFTKVSHGYILDLGYCEAGEEVKVTNTANELVQLVVYRLDLMAFRTAYEALAAQTVEVTEVSDTRVKGNVDVTQAGRLIFSIADEDGWTLYVDGKKRDSETFGSAFISTYLTEGTHEFELRYKSPGFLTGAVISAAAVVLFAATMAVRRKRKKGMSQKKTLLKYTKYVMWGTVALIPPAAFFYLLEFYTHNPFAEVRPWAQLFNIVLFELLAGIFLCITERLRTAYRIEGTAALVFGLANAYVVRFRTNPLVPWDILSWRTAVSVSGNYDFTPDTRMIVVTILFLALIIGLQPVKFKIGRPGFFKRCLPGVVLGAVLVMFAGTLQQENFQNEHRLYNKLFTPVFMTQVDGIPVTFVMNLAYMSIEKPQKYSVGEAKEFLKKYEEPQETEESIDTILEEEGKDASDDTSQSGADTGMPNIIVVMNESFSDLSVLGDFKTNEDYLPFLHSLQQGAENTVTGMLNVSVCGGNTADTEYEFLTGNTMAFLPQGSIPYQQYVNGERPSLASYLQSLGYETVATHPYYATGWNRDKVYPWLGFEQSIFKDQYYGARFVRDYVSDASCADKIIQLYEQKEEGRPLFVFNVTMQNHGGYDQTYTNFSPGISVDGVNSISVSQYFSLIKLSDQALEQLIDYFSGVDEKTVIVFFGDHQPSDTVAAPILAMNGMQWNALDEEQQKLRYQVPYVIWANYDIDEEQNADTSANYLGAEVLKRAGVPTDAYQNFLLTLKESYPVISAVRTVEADGSETPAKEEYGEMDIYRKLQYYFMFDWEEESGEMNENLELDRLAKENDNFKKIIQTQQNTINRMIDYFILGEKKAGLQKMFQFTDDCLIGIKELDDEHRRLFSLINQAMDILNHTDSNDRCTQITHLLEELTQYADTHFAHEEAYMEQIRDPELIRQRMQHSLFRDKIRDFSFADIDDPGKQQQVVTDLLNFLAKWLYHHILGSDIMIGKLPPLEEWMIRDNPCEFTDDYLTGIEIVDLEHQQLFCIVERAYQLVKSNDVITCYDELLSIIHELTDYTVTHFADEEAYMEKIGYEGLAAQKNAHASFVARLESINLIELDENPQKYMESLIEFLLGWLINHILYSDKKIPVQAMKEQSPLTPRYEVVEQLKSARKAQNVTQEVLAERVGTKKSNISRFESGRYNPSLDFLIKVADSLGKQIQIRIRMTKGKILGDIHQIDKDVELCRTTNERISNQAAQLLIENQIPFTRGWIKVPFFLREKYRGAHQIYVIRTNRNRYGQARRTIDQLDTSFRRRLILSNYMREKIRTFSGIHMSPADPRPEEICIEDIAHALSLMTRANGHFPVFYSVAQHSLDCAAMAQAEGRSSREVLACLLHDASEAYLSDITRPVKGCLPEYRRIEQVLQEMIYEKYLIAPPTEREREIVKRMDDTCLYYEFEHFTGEKLFDVAPQAAVLPEYRECPMREVEKKFLALFEKLMAQTVQEHGVRTDQMTGRYRRVAALICFVCCVLCSALSVTAAVADQEKRHVIKVGYIDYDGFITEEKDGTYTGYGVEYLRKIAEYTGWEYEFEYDSWDQQLKKLETGEIDMICQAQRTKEREKQYLFSDYAIGAETSVLYVSKENDIYYYNDYAAYNGMRVGMLRDSFQNQEFRDYAAEKGFSYEESIYDTQEACFGALDRGEIDAVAMGSLALKTDYKIICRFGSDPFYIMTGRQNKELLAEVNEALGQIAEAGASFQTDLYQKYYGEKEAEGEVVFTREEAEYIQGSGVITVAFIASRAPLSYRNAEGNVDGITVDILDLLSERSGLTFQYVMMPQGMRTADYLSKYPDSLVAGVLSDNPDFQKEPYILTDSFYTDDVALVGRNGQEYDVDADDVSYRLAIPASYVGLEHYIQMNAPQFEICEEKNLEDCLAMVLDGKADFAAQNVSVLTPYLANPYYEELAAVPTFFMEENTGIVGLDSEEHRMLIKILNKCIGMISEKEIAQFKVDHTLATAYEPTLSDMVYKFRYPIAVIGILLLQIVAWMVAFELLRRRNYHKLEEKNEQLAVAVAQANSANEAKGQFLARMSHEIRTPINAIVGLTEIARHRSDEGGGVEECLDKIDTSSKVLLAIVNDVLDMSAIESNRIKIAQAPFSLKEVLDSISAVYGTQCEQKKIAFTVEMDEVQVEQVQGDVLRLNQVLLNLISNAYKFTPEGGSIRVTVSELPMQQEQFFYKFVVTDTGEGMSEEMQERLFLPFEQEEAETAQHHGGSGLGLSIAKNLVELMGGSISCQSKKGVGTTFTVSLPLAHAVDEKKQKAEETGEGEAEEDASESYDFGGRRILLAEDTGMNAEIVTELLELVNMHVDHAWNGEEAVERYMESAPGTYMAVLMDVQMPGMNGYEAAKAIRAQKSSRPDAGEIPIYAMTANAYTEDISAALNAGMNGHIAKPVDTAALYRLLKKSMEETEMPNYDFKKQPALLLQGAMDTETEYLIGQLGEPEEITYGNWKFYTGFLGKHAEPVVISRTYQGMVNAAAATAIAMTQFCLWAVINMGIGGGHDARFHRGDIVVGERVVPMGAMIRKYAPEGAGIDECDFEPLPIEIFDKTLGQTRKVLDFPCDERLGDAAMKVQTDVYVGRGVIGSADEWNNQLDRIALLRERYKTAVEDMESAAPAELCLAYGIPFLGIRIISNSIVTGESFEEAVGVDVQKFAVSFVERLHGMREEQEMEKIASFTIDHIKLQPGIYVSRKDHVGAEVITTFDLRMTSPNDEPVMNTAEVHTIEHLGATFLRNHKDFSDKTVYFGPMGCRTGFYLLLAGDYESKDIVPLMIEMFEFIRDFQGDVPGAAPKDCGNYLDMNLGMANYLANRYLENTLYHIDAAHLIYPEMADKRDYYEVLGVSKTASDDEIKKAFRTLAKKYHPDMHPGDKECEEKFKEAQEAYAVLSDAEKRKQYDQFGHAAFDGTGGGAGGFDFSGMDMGDIFGDIFGDFFGGGSRRRTNDGPMKGSNLRTSVRITFEEAIFGCEKEIEMVLKDECHSCHGTGAKPGTTPETCPKCGGKGKVVFTQQSFFGTVQNVQTCPDCGGSGKIIKDKCPDCRGTGYIASKKKIQVSIPAGIDNGQSVRIREKGEPGINGGPRGDLLVEVVVSRHPTLQRQDMNIYSTAQISFAQAALGGEIRIHTVDGDVLYEVKPGTQTNTRIRLKGKGVPSLRNKSVRGDHYVDLVVQTPTGLSADAKEALRQFDALTGDSLNRTGAQDGAGSSDKQEKPKKKKGFMDKIKESLDDIMGKIIGIDLGTTNSCVAVMEGGKPTVIANQEGARTTPSIVAFTKTGERLVGEPAKRQAVTNAEKTISSIKRHMGTDYKVAIDDKQYSPQQISAMILQKLKADAEGYLGEKVTEAVITVPAYFNDAQRQATKDAGKIAGLDVKRIINEPTAAALAYGLDNEKEQKIMVYDLGGGTFDVSIIEIGDGVIEVLSTNGDTHLGGDDFDNRVTQWMIDEFKKAEGVDLSTDKMALQRLKEAAEKAKKELSSATTTNINLPFITATAEGPKHFDMNLTRAKFDELTHDLVEKTAIPVQNAMRDAGLTNADLGQVLLVGGSTRIPAVQDKVRQLTGKEPSKSLNPDECVAIGASIQGGKLAGDAGAGEILLLDVTPLSLSIETMGGIATRLIERNTTIPTKKSQIFSTAADNQTAVDINVVQGERQFARDNKSLGQFRLDGIPPARRGVPQIEVTFDIDANGIVNVSAKDLGTGKEQHITITAGSNMSDDEIDKAVREAAEYEAQDKKRKEAIDARNDADSFVFQTQQALDQVGANLDAADKSEVENDMNAVKSFLDAHQNAEEMTEADVTELKSLQEKLTQSAQKVFAKMYEQTQAAQGAAGAGPDMGNMGGAGSTGSTGAANDDVVDADFKEVMAEKKEEMMEEVLEDLEKDAAEKQAEEVSEAEETETETEAAESGEQAEETEESEAEDGQEAPADEKKGFFKKKKDKKDEQIEELNDKLKRQMAEFDNFRKRTEKEKTQMYDMGAKSIIEKILPVIDNFERGLAAVPEEQREDAFVVGMDKVYRQMLTELDASGVKPIEAVGQEFDPNFHNAVMQVESEEYDSGVVAQELQKGYMYKDSVVRHSMVAVVSMDEMELDERKIKILDAIIRNYLETGEPVGSRTISKYTDLNLSSATIRNEMADLEELGYILQPHTSAGRIPSDKGYRFYVDHLMEEKNREVDDMKKFVIEHTEKVDQVLQQVAKMLAANTNYATMVSAPSYHRNKVKFIQLSNVNEEQILAVIVTEGNLVKNKIIPVSEPIDNETMLKLNILLNSNLNGLALQDINLGTIAKLKEQAGIHSDIISDVLDTVAETMGQDEDIRIYTSGTTNLFKYPELSDSTEKASELISTFEEKQQLASLVTENLLEDKSTGIQVYIGNESPIQTMKDCSVVTATYELGEGIRGTIGIVGPKRMDYEKVMDNLKVLKNSLDGILDRPKGETMTDPYQVLGVSRGASDEEIKKAYRALSRKYHPDANVNNPNRDEAEEHFKEVQQAYDQIMKEKQQGGGYGYGGGYSSNSGGYSYAGSHGFGQNESPKMQAAANYIASRHYVEALNVLNGIPFGERRARWYYFSAIANQGMGNNINAMEHAKRAVEMEPSNMEYRQFLQHLQYGGTWYTSMGSDYDRPYASAGNWCLSLLCLDLLCNCCCFRPFMFGYININQKIMTEENRKAYQAYYCGLCQRLKSNCGAKGQMLLNYDMTFLIVLLTGLYELTNESSEITCALHPTRKRQVWINEATDYAADMNLIVAYHNLIDDWKDEKAYTKKAFAKMLDKDYARVIEKYPRQVHAVEEFMRKTDEVEARGETNLDVVAGLTGEMLGEIFCWREDEWQEELRTLGFYMGKFIYIMDAYEDYDEDRRKKEYNPLVYAMRESADDMDTLCRLLLTSMMSECAKSFERLPILLHADILRNVLYSGVWSKYEYLQLKKRKAEEKNKKKARKMREKLQRFMTGRYGADELGRTLNIVVLVSLVVSMFSGLLPVLSVFYWFGIALMIYNCFRMFSKNVSKRYEENQRYLSRRYKAVVKRDQWKKRFAQRDTYRFFKCPGCRQRVRVPKGRGKICITCPKCRREFIRRSMNGIKLFNDLMEYADGKGASDVHLVPGRTAMLRIDGELTAAGQEDAAEWQDADLTEVTEQILSGDQLEEYRTKGALVCSYSFSKALRLRVSVYRQQGRDAMSVRLHPAGVPMPEKLLLPEEITELVKNGRGLLLVTGGRGSGVTTTVASLAAQIAATQSKVIVSVEDTTEYILPQGRGLVVQREIGADCASREEALAMALQQDADVILLDGIGNEREAGLLFAAVRRGQFVILAEKEDSVTAALLHLVQCGGSTSGSQILLESLAQGLAGAMAQKLLRRQDEAGRVAAYEVLVADAGVRSLIAENRIQQLDTSAGAEKERGRVQMDDAIYNLYMKSCITSETAIAGAKDPEDMRRKVRLFMGKDMVSLTIEGEVRQYPAGTSFLAISQEYQEKYPDDIVLVVYNNRLRELNKTAQRDGMLSFVTTADKTGKKTYRRSVTLLMQKAVYNLWGSEHISVRVLYSIGQGYYCELREKADGQERVIAVDEERAIALKKEMYRLVTEDIEIEKRSMNTDDAIALFHDLGMEDKEKLFKYRRSSRVNIYVLDHYKDYFYGFMVPSTGYLRYYDIVTYEDGFVLLFPNENTREVAEFAPSGKLFHTLKASREWGRMLEIGTIGALNDAIAEGRMQEIILTQEALFEERIGHLADTIVKSGGKKFIMIAGPSSSGKTTFSHRLSIQLAAKGLKPHPFPLDDYYVNRDQCPRDENGELDLECLEALDVELFNHDMNELLAGRRVNLPVFNFKTGKREYKDRYMQLGKEDILVIEGIHGLNDRLSCSLPVESKFKIYISALTQLNIDEHNCLPTTDGRMIRRIVRDARTRGTSAKETIAMWDSVRRGEERYIFPFQEGADVMFNSALIYELAVLKMYAEPLLFAIDKDCPEYLEAKRLLKFLDYFLPMPSDGISQNSIIREFIGGSCFNVMVKISERLRTAAGLIGEGERLADVGTDHGYVPIYLVERKHIPSAIAMDIRTGPLERAREHIRMYGMEDYIQTRLSDGVAALKPGEADTILIAGMGGGLVKHILESGRVICEQAHGLVLQPQSELPKVRRFLMENGYVTEREEMVMEDGKYYPMMRVHFDASAVSHADSFTEEQELEFRYGKQLLTEKHPVLLAYLRWEAQIQQDILTQLSGQPATEQIAARIDDVKQILAQNARALAYYEMAKKKENTDNKEVLGENKENSAAKTADAGAENGVASAQEKFQIKLRELLALAKKKKNMLEYQEISDFFSDMQLDAEQFEKILDFLEANNIDVLRITDDDVDDEMLLDVDDEDEIEVEKIDLSVPDGVSIEDPVRMYLKEIGKVPLLSAEEEIELAKRMELGDQEAKKRLAEANLRLVVSIAKRYVGRGMLFLDLIQEGNLGLIKAVEKFDYRKGYKFSTYATWWIRQAITRAIADQARTIRIPVHMVETINKLIRVSRQLLQELGREPTPEEIAAEMNMPVERVREILKISQEPVSLETPIGEEEDSHLGDFIQDDNVPVPADAAAFTLLKEQLEEVLGTLTEREQKVLTLRFGLEDGRARTLEEVGKEFNVTRERIRQIEAKALRKLRHPSRSRKLKDYLEMPRYSDELIEEVRSRNDIVDVISQYVRLSKKGSTYFGLCPFHNEKTGSFSVSPNKQMYYCFGCHAGGNVFTFLMQYENYTFGEAMEALAERVGVDLPKQEYTAAQRQEADRRARLLEINKEAAKYFFVLLRGERGKRALDYFKKRALSDETIHKFGLGYSDQYSDDLYRYLRSKGYDDEILKDSGLVTIDEVRGGHDKFWNRAMFPIMDVHNKVIGFGGRVMGDGEPKYLNSPETKIFDKSRNLYGLNFARATKKPQLLLCEGYMDVIALHQAGFDNAVASLGTALTSGHANLLKRYTKEVYLTYDSDGAGIKAALRAIPILKEVGITTKIINMKPYKDPDEFIKALGAEAYQERIDQAENSFLFEVRMEEQQHDMHDPEGKTAFYNAVAKMLCGFTEKLERDNYIEAVAAKYMISPDDLRRLVNQQGLKAGLAGGGRAPQSVADAQDGARTEYKKSAKKREDGMVQSQKLLLTWLTNSPALFPKVQRYVGADDFTDPICHSVAKMLFEQYEKDGTVNPARIISTYEDEEQQREAAGILNATIHRVDTREEREKALRETVIRVRENSINHKLANTFDVQEMAALAKEKNELPGTVHIPLEEMSIREEIERMECETLSPYATLSIHSKGRDVYEEPCDIRPVFQRDRDRILHSKAFRRLKNKTQVFLTPKGDHYRTRLSHTLEVSQNARTIAKALRLNEDLVEAIALGHDIGHTPFGHAGEFVLNGLCENGFRHNEQSVRIVEKLEKDGKGLNLTWEVRDGILNHQSRLMPHTLEGKIVRFSDKIAYINHDIDDAIRALVLTEDDIPLELRKTLGFSTKQRLNTLIHNIIMNSREKDDIMMSPEIEEAMIDLRKFMFENVYKNPVAKGEEVKAKAMIEQLFYFYKEHLDQLPAKYLRMMDEGESAERVVADYIAGMTDQYAITKFSEYFLPQAWQVDGYMVLFLLIILIMISVYWRPMWGILRGLLLGFLFLIGGSSLNIPVPVSFVVFVLYCQLGTPWLRKTNYRQTKATRTFHESTTTDADHSTYTTEQYYYAYEVDGTDYTNVHSIYPYNKKLHAEAKSAECEIFYHPKKPKKMFCPEDIAKDYYTIWILRFLIGGTIIATDFYFMKITIARQCGSGGHKVADILSEKLGMEIFDKKRFIEESKRRNVYDENANFLNEKPIDSFLYSLIMSYGSKNPRERYIRFVKDVTEQESCIIIGRCANIIYKDDPDCVSVYLHADPDIRKKRIQERDHVSEKEAAETLREVDEKRSAFQEQCTATRWGDGNEYDLCIDTGKIGIEKAAELILQYIEYRKMALSRGMNQEASQDTDLGLLDATLMQNLQDRFCDANNVYLVCLSRTHGVVTKAYGSKEELAYIHGLTGVERHMTLMNRLLDDGIESVLEEDCGNDLVKMCGVSIKIGGKTAAIWIVIGIMEREDADVPSYVMRTTPERYDKSLEFLETLSKQMFAVKMEELMAQEAVLKSRESETQMEAELHRNEVMTSIVKMLESENSFEEIVHDILRECCAYMEISRGALLKENKEHSKIEMICEYAAPGMDSVRGEWSGVSREKMPFFNGKPYMISSNSMMPEVFRQFFDAHGLLAGIFLPVEVNTRAEMYLCFLEEHEERNWEVTDVKFVNDVRRIIQSILLKRIAKNSLASSYASLEAILENVGCGIYVKDPVSGRILYSNQRLRAFLPDDAAPDMLENCWREESGGIDTDCFREIYLEQEKRWFDYHRTGIHWVDGRSVFLYTIYEVTDKKLYQQKIERQANNDFLTGLYNRMRFEQDLAHCIEQTKEFGGEGALLYIDLDDFKHINDGLGHQYGDILLKNISDSLRRIPGVENNCYRMGGDEFIIILAHRQIMMLQKILNDIRTLFSKPWMLKGADYYCTMSMGVVRFPTEGDTVEELIKKADIALYAAKCSGKNRVEFYDENVESTSFRRLDMEKNMRNATNNAFSEFEVVYQPIVDVTRESNPCVGAEALIRWNSGELGLIAPTDFIPLAEYLGLINPIGAYVLEEACKRCKYWNDMGHPDYKVNVNLSVVQLLQNDIVEQVHSVIKRTGIVPENLTLEVTEGLAINDMSRMKKILSEIRALGVRVALDDFGTGYSSLNHIREMPIDVIKIDRCFIIDIGKDEFSAAFVKMVAELAQTIGVHVCVEGVETKEQVDALKQTKIQLIQGFYFGKPLHKEEFDEKYLMIHEYYKELQNNQNIRENLSLLRSECKDPQARETLLSLVGDGALLTGLLESDEPKVRKNAALLLGSLGLLQTAGSLFHAYEREQTLFVRSAYLTALSGMEVSPYLEALKEHRDALLAREIPENEKKHVNEELRELERIITAAEGITRHTFVGFTEPQDFLLATNREQRGVTLEEVKAVSASVRRSEKLHPLGVLVHAKDVRPFASIRTYRELLFPVRTAQPVPEDALGAAEAVWDSNLRELLTQAHRETTPFYFRLEIKSHMPLDKKSTFARRFSAELERLSGRMLVNAPSDYEIELRLLEKRDGGYACFLKLLTIAHGRFVYRKNAVAASIHPATAAMLVALAEPYLKENAQILDPFCGVGTMLIERDIRVPAREKYGIDIFGEAIRGARENASYAGEKINFINRDYFDFTHAYLFDEIITNMPVRGRKSKEETDAFYSRFFEKSAGLLKADGILVLYSNEQGFIRKQLRIRSDYRLLAEQCIREKDQFYLFVIQYKGMREEQEEKYRREERRRYEEKRRRRRKRLRRRRRLRIVLLIGIPLLLVLAVWFGTRQIKKLLYEEKPVMAYEVKYVAQAPDYQVELLDYNEYSRPGTALSQVNGIVIHYTANPGTTAEQNRSYFENLKDTGETYASSHFVIGMDGEIVQCIPCNEIAYASNDRNEDTIAIECCIPDETGEFTDATYQSLIELTAWLMGRYDLTTDDVIRHYDVTGKMCPKYYVEHEDAWLLFKQDLLTYIDVNGIAKNEEISMKYTIDPTMTYSEAVLFYEEYLTAAKAAGKKPVSFLHFITGRYMTETGSDETASISKKELPVVATSQQMEEGDSSTVVVDDFEGTQTGETAEDVTEQPELGTELSDSADADVDAEVKTSYGDAVTLSTETVRNEDGSVTTNTTRQSYFEIEVYVDEAGGMVVVTSPTSCGVPGKADYNGKEYQTDGTVDSASMLQIEDFLNTFFGMYPTATEKELAYYAVPGTMDVIGADYVYDGLYDATYYKEDDQIMAHVYVKYLDQVAKVTEISEYTLTLEKGDNWRIVAAEMRKNKEKVVREESGSKNSGWKVVLEKVKVYREKKHQERVDSGDAELPVLRVGTNKRAVRILWGLMIASLAFGIYKNFTAVDTNTVHERMVVEAKVQDTNELENFVERFAYIYHAWATDQNARSERQELLKSYMSDALAGLNGMVIGTDCPTSSQXXXXCVSCALYGQAAFDRDRVGEDVREILNTLCKYKNVEIIAGAVCVDHVHLSVAIPPKLSVSDFMGYLKGKNTLMLYDRHPELQSKWDKAFWARGYYVETIGNITDEAMSYMETYKEWCTNPYFDENTKAELAAMEKMFSSEGVTKSDRMLHTPGMFAKNHLLYVQEVGRLESLVPHVCRRENLDSYLIFEVVAGKGSISTEGQTIELHKDECVWIDCHKAFEHVSSEDEPWKLAWVHFNGNCAAEFYELFHKKNAVPVFKTSEKEDVADLIGKILEGVKENASELAIHSMLTQLVTGCLQETTGKDTMEEVREFINANFAEAGIYTLLTDRFGMEQSLLEQKFLGSYGISVRDYILNRRFNAAKELLRFTIQPMSEVITESGIGNEDLFYQLFRENENMTPEEYRKNWAQWIKDMSKALIVGAAGFVGSYLAREVKDHHGMEVHATKLAHEQLEIPGVAIHDLNILNKDEIVALLYEVRPDYIFHLAAQSSVSVAWKNPGLTIDINVKGSVNLMDAVRELFYKPRVLLIGSGEEYGHIREGETPIKEDNYLRPGNIYAATKVCQNMIASIYTQAYDMQLMMVRAFNHIGPCQSPIFVISDFCKQVAEIEAGKKEPVMYVGNLAAKRDFTDVRDVVRAYALLVQSGTAGETYNVGSGHAHEIREILDLIISLSTKEIRVEIDPNKIRPVDVPIIEADITKLNAATGWKPQIPLEQTIQEILDYWRERVMRKIRMIIGTVLCAMVLALGNRMPVMAEEVVSEELKAADTLNLTVSYPSDIKCGEEVTFKLLATGGSGTYKYRIASLTDAQQNFVYDISYGSNSVYGDSDEFKFTFYASGTYYIRFGVMDMGSTPYQTKTTGLLEYPIVINDPNYPSVEELVANVAGECEKSCSTDFDKAVWLHDWILDHADYDYTYSYCAAEGVLARGKGTCESYHRAYVMLLNKVGIPTGRIAGNGHVWTAAQLDGKWYQIDSTWDDMGASYKGTFYEHLYFGLNDDIMKLVHSDHTQPVEGYECNSLEENYFIKTGEIHQWSDPFAEKIRQKIAAGETSFTLAVNSDLPESVVNVIYRLVAYELSSESWTNATLSASYDNQKLTCSVTVKTPENNGGDNGNSGSNDSNNGGNTGGNSGSNDSNNGGNTGTDNGNSGNTGTTLTGKQRFASLLYENALGRSAAQSELDYWAQELTNGRTGAEVAYGFLFSEEFQNHNYNNADYVEHLYLSLMGRASDSDGKAGWVKTLENGTSRLYVFRQFINSEEFQQLCNMYEIQKGDVSLTEERDQNYNVTSFVARNYTQFLSRNYDTDGLNHWCEAINHHTQSMQEIAYGFVFSTECSNKNLSNTEYVKMLYRGCFDREGDDAGISDWTNALNSGMMDRTQVFWGFANSQEFANMVESYHLMKKIRRSLAVFIAAFVMITGAGLLTEKTVPVRAEDNVTAFVDRMYQVCLGRAADEEGRADWVNRLQTGEARGADVAYGFVFSTEFRNMNLCNSCYVDAMYQAFFGRTADEAGKADWMNRLAEGQTRGAVMTGFVNSEEFSALCASYGIESGSGDWSDISIPILGNCSWCGADNDTITDFVTRLYRICLEREPDEAGLADWSTQLANGAEGSQVAYGFIFSTEYKQKHTSNTEFATMLYHTMMDREPDDAGLTDWVDKLNYTNTREYVFNGFLFSTEFARRCAASGINIGNAVETPDATDAWQMNVQILALCNEQRQNNGLEKLMTREDLWEQVAQVRAGEIVNYFSHTRPNGSSCFSLYDEAGLDYRAAGENIAAGYYGASAVVDGWMNSTGHRANILSESYDYLATGYATGGAYGTNYCQNFLGDWMKRRVLAAFLAMILTCGVAFPGNAVYAAEVTETTVESDAAVEETAVQTTDAEAEAKPEGSTEQPETTEAAEAAVTEATETEETEATEAAESKPVTEMSAAEDVAAVKVTENMKYAASGKCGDNLTWSYNKGVLTISGSGAMYDYPVYDTPGSPQCMPWYAYKTSITTVNIAEGVTSIGACTFYGCSSLTSVTTPSTISTIGYAAFADCTRLQQATIKSGFVGESAFIRCTALNTVSVGSGVTGFGISAFENCTGLTGVYISDLAAWCRIDFGGYLANPLQFAKHLYLNDSEVTNLQIPDGVTAISDYAFEYGQNITSVTVPSSVTTIGDYAFYLCNGIRTVNLPAGGLTRIGASAFDSCSGLTSIAIPNSVSYIGTFAFAWAPIESANIYQGVIESHAFEGCGCISNVTIGSGVTYIGDNAFNRCAGLRTVQYGGSRAQWRALEIGANNEALTGASVTCSGSGSASTDGVDRTKIHVGGTVKYGSYEQDNNASNGAETIEWTVLDIQGDKALVISKKVLDFQRYYPNLQTTVTWANSSIRTWLNDSFYNAAFSDGQKSGIYTTSVSGESNTVFGTSGGSATGDKIFLLSASEAANYLNTDGKRMANCTEYALSRNGDPALRNTNTQSSYWWLRTPGIYTYDAMYVHYTGSLRYDGMAVANVIGGVRPAMWVNKNVVEVVPESNRVITEDPIEQFVTRLYQVCLNREPDDAGLNDWVNRLSSGQASGVEVSYGFVFSQEFQNYNYCNTDYVKQLYRAFMGREYDQGGLDDWVGRLETGTTREEVFNGFSQSEEFNNLCTQYGITRGDGIAVPQYGTVPRGACTVCGATDGVTAFVTRLYNICLDRNPDTDGLNDWTNGLWDHTKSGGSVAQGFIFSQEFKNKNLNDNDYVEYLYRAFFDRSADAGGKADWVSRMQTQGYSREDVFNGFVGSEEFNNLCKKYGITRDMKKRIAAILLLGCMVMGSVGTPAQVSAAEVAETVTEEETEQTSEETSVDTAAAESTETAENTETAENTETAESTESAEPVKAAAADTTENETEATAEEITHPTGLLDLNVINVGTIAEDDILDETEANSSKSSSVYAAAWDAYSSNYVYNMLSTEERKFWDGLDASCRQVLLGTDNLTDGHIPYVSCGSLNSNRITYVAYMFRYMNPQYYFINVSLYQGGSSSVWYAAFGVYSAFQNGTARSTATQSVKNQVDTWKNTVNSLSSEAEKVKMIHDLIVQKVDYNTDIYGNSFNEDTAYTQSVYSVFCMDKTVCAGYAQAFEMMCNGVGVDCIAVTSDDHEWNKVRINDSWYNVDCTWADQSTIDYEYFERSDAVYDADLASYASSHAEESYWSEYLPACTLDSGATYSDPGTLPTITQQTAQPQISVTANNNVNYVTITSSTPNAIIYYTINGDTPTPAYTRSEKYSSTFTLSGSCTVKAVAVCDTYWDSNVASKSVTATTGTTGTTDTSDTTDTTTQHKAAPFVKLLYQYVLDRSATQSEVDYWVGRLENGSTGAEVAYGFLFSEEFQNKNYSDADYVEHLYLSLMGRASDADGKADWVTHLTNGVSRLYVFRQFTDSTEFGNLCNTYEIERGTVTLTEDRDQNYNVTRFVARNYTEFLGRTYDVDGLNDWSGRINSGYGMENVAYGFVFSQECINMNLSNSDYVKMLYRGIFGRLYDDEGLNDWVNQLNNGTSRETVFWGFANSQEFANMVASYGLMKKRVLACILAAALLTTGIPGGQAAMAQSLTENGTEMATEEVNPENTSEETEAASVTETEVQTSTERETEDVAEGSESQLTVTEETEAAEETEAAEETEAAEGTGKTEETEETEAVEKTGHLKASGTVAEEALEEDPQAGTSMSNEEPESTSNIKSSSATYSGYTGSSYIHNGRYDSGYKIVNGIDVSYHNGDINWSAVKAAGIDYALIRVGYRGMSNGGLFDDSKYRANIQGALNAGLRVGVYIFSQATTQAEAAEEANYLLNRISGYNITLPVVIDYEFGTNHSGRLADANLDIDTATAVVNAFCTTVQSAGYTPMVYANKTMLQSYIRGEILDDYYKIWLANYTTQTTYAGEYYAWQYSSKGGVSGISGYVDCNFFYVRDNYQNAQLYVTRLYESLLEREPDASGMNAYATAISEETMTAADVAVDIISSSEFKNKNYTNEVYVRKLYAALFARSPQDSEVSNWVEVLSNGVSQKYVLKQLIESSEFATVCSYYMFSPGTVSLTENRDQNYNATAYVMRCYRKILSRDADVSGLNTWTGKLVAGNGGAEIVKDLVMSEEFRNLNKSDAEFVDILYAAMLDRSSDESGKNTWLSTLNDGVSYVYVINGFAGSTEFGNICSGYGITPGQAEITEARDKNIKVTQYVNRCYEKALGRTGETDGINYWCSIILSGAQSPKDVAYGFVFSQESENQNRNNADYTEMLYNLCLGRASEAAGKADWVGRLEQGTSREEVYWGFANSEEFENIIASYGLMKFNKWVKSVTAAVVLSLALSVTAFGAETDADELTMVTSEQTEMKEGMVGAGAHASIYPDPTMYDATFSNNTKINLLFNVRTFGNDMERYEIRIFKGSTESSANLVARKNADFDTTKGTSDITYSWDTTDYSKYTPGTYTISCTSFYNSTNGDVVNQKEMFTVTLEDYRLILDRQFVQRLYEKVFQRTADTAGLNDWSNKLYNGTTTGATTAWNFFFSPEFGNKNTTNEQYVNILYQALFDRNADTDGKANWVSLLDNGVSRAYVLKGFTDSSEFNNLCSVYGIQQGTITTSENRDKNPQVTAFVNRLYTIAMNRAADVNGLNDWTGKLLAKTKTPKQVASGFVFSQEMANRNLSNQEYVTMLYRTMMDREPDEAGLNDWVTRLQSGTSRQSVFDGFADSTEFDNIVRAYGLKMKKKKLLQLLSGALTAAILISGNGVAVAAQELNGTAGEYAQAEQTEEAAVQTEETEQTEEMTEQSDGTKQSEEIAVQSEATEAVEETTEQTEETQTKTDELRQELLQLLEQKTVMATVYLADLYEVREEPDADSAVEGSLPSGSQVLLKDVAIDGGSVWYYVMFAVDGQERYGYIEAAHLVTSDTDFRAWEEKLGAADEVAGEKLKKSGNQDILAFPESYRAALTQLKASHPNWTFVPMQTNLEWSSVVSAEMQNNRSWVHQSKGDNWKAEAASQSGWYIASQSAVEYCLDPRNFTNDSYIFMFEQLTYNAQYHTVDAVSNIVSGSFMQGEVPGAGTTYAQAFYDIGNSLGVSPFFLACRVYQEQGSAGTSPLISGNYPGYEGYYNYYNIGATGTTTTDVYVNGLKTAQNKGWDTRMKALTGGAQYISQNYILKGQDTLYLQKFDVDASYNGLYSHQYQQNITAPMTEGGKIRRAYSQTNALENPFVFKIPVYNNMPATACPSPDDQDNTATAAALRAFVVRLYEDALGRTSYQDSEIDYWYQALRNGEKTGAEVAQGFFFSDEFKNKNLSNEAYVNLLYQVMFDRQADDSGKADWLAKLSNGMSREYVYRGFANSQEFANVCSQYSVIQGTVTLGSYRDQNEGVTSFVNRLYVKLLDRQGEDEGIENWCRTILTKADTTENVAHGFVFSQEFLNKNTSNEEFVKIMYRTFLDREYDQAGLNDWVGQLNSGVGREQVFHGFAGSTEFHNLMAEYGVDMDADLMTKEELHAKLQKGYEDLQVGRTQNAGDAFAKFRESHMDNCSKKGIDKESSILLITGIILLILLVILVIINTETSIVMILGIVMLLCTYEFTETFFDNSGIKKMKAFGWVLMILAMNIMIDAVYDNVTRFEAMFFCGLMIIGIIAFFIHYFKCKEWVEELFLAVGFVCFAFLFAIVLFEISFFFWLFKILALFMICTFINIGKKTNRLAGMIIIIGAYVGMVVLNGFLNIELLEGRVEDGWKNYYTAVYNMYSLPEPVRINDGKNQIVETLANYILCRLMDAVLIGGLVNMISEKKKGDDDKCNAHMDLSFYKDKRVLITGHTGFKGSWMCKLLIMVGANVTGYALKAPTDPSLFELCRIADGMNSVVGDIRDLEHLKKVFAEVQPEIVIHMAAQPLVRESYQNPVYTYETNVMGTVNILECVRLNPCVKSFVNVTTDKVYLNKEWEWGYRENEELNGYDPYSNSKSCSELVTSSYLKSFFQDSDTAITTCRAGNVIGGGDFATDRIIPDCIRAVEKGEEIVVRNPFSTRPYQHVLEPVTAYLMIAKAQYEDKKFAGNYNVGPDETDCWTTGNLVDLFCKEWEKQTGTQVTWVNKYDGGPHEANFLKLDCSKIKRTFGWKPVWNVEKTMEKIVEWSDCYLKHGDIVECMERQIEEFCGMFENKTEEQAKKEILTMVAEYCNTYHNKKKPYEPGDRITYAARVYDQEEMCNLVDSALEFWLTSGRYTEKFEKAFSEYLGVRYCSLVNSGSSANLCAFMALTSPLLGERQVKPGDEMITVAAGFPTTVTPAIQYGVVPVFIDVTIPQYNMDVAMLEEALSEKTKLVMAAHTLGNPFDLTAVKAFCDKHNLWLIEDNCDALGTKYTMNGEEKFTGTIGDIGTSSFYPPHHMTMGEGGAVYTDNPLLNKCIRSMRDWGRDCVCGSGQDNLCGHRFDRQYGELPLGYDHKYVYSHFGYNLKATDMQAAIGCAQIEKLPDFAERRRANFERLRAVLVGTEDKLILPVPCENAKPSWFGFLITCKEGVERNKVVRYVEEHGIQTRMLFAGNLTKHPCFDQMRASGKGYRIVGELKNTDRIMNDTFWVGVYPGMTDEMIDYMAQTIKEAVNCTKCYEPDQQMKVVLLAGGLGTRISEESQYKPKPMIEIGGMPILWHIMKEYSYYGFNEFIICAGYKQQMIKEWFADYFLNTSDVTFDFTQGNKTIVHNQHAEPWKVTVVDTGLNTMTGGRIKRIQPYIGNERFLMTYGDGVCDVDIAKLVEFHNRHGKIATLTAVMLEQQKGVLDIGGDNAVHSFREKSFMDSAPINAGYMVLEPEIFDYIEGDDTVFERDSLERVAAEGELMSYTHNGYWQCMDTKREMDMLENLWQSGNAPWKSWMKKYNIVLIRALACIAVILYHMNNMMFGIGGTTSSLLAIGGIAPYFFFVISGFLVSVKKDVGDIKTYYVKRILRICPVYYLVIVYNIFFWGILLNWNWPVDSSGMYWWRYFLFLSTTVPTGEGLWINVNATWTISAFMFFYLINPLTHFIKNKSAKVFAAILVVSVFIQTFYDQYVYLNAFPSPISCLPYFLIGMLARIYVDEEEEKRGCCVFALFAVVIALIKGANFLVYACLIAIVILCSGQLKEGTGILTKIINWTSDRSYTLYLIHATVFATFQQFYGLGRINKAVYVFAAVVLTLVFTELVYRYVEMPANRLAKKMTLKAQRSMNKSNRRILLVIGPLLMILCTVLLPAAIFETLESRAAIGTVVWMAFWWITGPVDYAVTAFLPIAVNAVLQMVDMKSITANYASETILLLLGASILTASWEQTGLDKRIAIRFLNLIGSNLKKQVVFWFLLSAILSSVLPNAVVCATITPIAVSMLNYIGERDVASSRIASKILLTIAYAAGVGGLASPLGGAMNLVVIDYIQQITGSEYIYLDWVVRFFPIMILLFVSNILFLIRDVDKSEDLGASNEYFANELKKMDKMSFEEKVSLALFLIATVLSFARQAYQNILPGLKPAYVFLTCAIIAFFITDTSGNRLLMWKSVQTKIIWELIYVFAGGLAAGTLINDSGAAAAIGNAVSQMGLKGGLVTVFVIMCFTLVLSDVTSNTATAAVAVPIVVSIIQGIGENPLPYIYVATVGVNLSYCFPTSIRAIPVGYGLQPKYMLKEGLKLSAIVIVLMTASCYFLFARMKKNVIKVTVFFGILGGLFWGAQRMVMPKYYYPNTTVAEAAGRIYRGFFDEEKDSIEAIFAGTSHMTYSVSPVELYEEYGFTSYNLASARQPLAVARYALQTALKTQDPKVFVLDVSSLFTDFYDGAGFKYITEQVPLSAEKLQLLQEMSTLSDDEDDMVSGLFPMINYHSRWKELDENDFTYMRDNKHFFMKGYYLNSRCIPSYIDVTYMNYETQEMLQDNEKVTYTWKNQQFCKEKEDDELYVAEVPDYNLQLLLDIVDICKKNDVKLLLVKIPDVNSPAAYESAWTQERSAAVKEIVDEYQLDFFDLLYDVDCGIDWTTDSTDGGGHLNFLGAEKVTDILGQYLVENYKLEQKEYTAWNEDAKLYDDLKNVASLEMETDFYQYMSKLKSDFADKTVFIVCTNEMSNGLSEREISLLRSMGFNADYENGYRQSYIAVMKNGEVTFEQMSNRAIKKKGTVGDSVEYVLYSAGHYVGSTSGIKIGGETFGTNQIGLNIVVYDQDKDIVLDEVNFNTFAEEHEAIRNSWDVDAEYLRQYEDYLINHVEMCRSIVEKVLWHSKETPDKLAMADGKRGYTYSELAHTIAKLAVVLEDGMVSKGDYVLVECTQDVNFLMLDLACQYIGAVFVPLEKNAAQERVSSIYEEMDARCIIAESNYESAGCCYQVSDVLQKAEGVTEKELNYVHRNDVAEILYTTGTTGQPKGIVISHQANIAIAQNIQQGVRMNASSVEIIPLPLSHSHALRTSYANLYNGSAVVIADGALKIGALFELIETYGVNAIDISPTMAKLLLKIAKRGLKKYADVIEYIELGTAVLEDETKEQLKEIFPQTRLYNFYGSTEAGRSCVLDFKEYDHTGCIGYPAVNAEIFIVDDGRKQMQSDAGHPGLLAVKGRMMMDGYYHSEELTRATVVDGVLYTNDLGYIDEAGRVYVMGRKDDVINYKGIKIAPEEIESVAVKYDGIVDCACVPAKDAVCGQVPKLFVQIADSVEYDEQQFFEYLRASLEASRVPDAVEVISEIPRSSNGKLQRKKLMEMREKVLAVCTRVNEKVDYTRTDLIDGGYIDSVTLVEIASELMDEFDIEIPYEEIMPENFNSIDAMTALVEKYVMLEVIGNGDSFWKSILSAKMQYNSLLFFVFFLLFLCVFFLCRDEKKKQICILTGNIIFYVWAGWQPVLIVLGSGLIAFFATLKIEKIYSRYEGEKEELSPKEQVTLFNGYKKKARKHLILAMVLLFGVWILVKLGKLLGFATVTTFAAMYEKTGVIVPLGISYYTLSTVGYILDVYWRKVVPTHNFVEFFSVMTYFPHIVQGPISKYSDLIEKFRKIPKFDFERVCFGFQLMFWGYIKKMVIADRILLYTKGVFAAPQEFAGVEIFIAVILCVVQLYADFSGCMDIVRGISQIMGIELAENFRQPFFSKSATEFWTRWHITLSAWTKEYIYLPIAMNPKFLKFTKKMKKNGKTWLSSFLKGMVPLIAVWLFTGLWHGTGLDYIVWGLYWCLLMTLSKETAFIWDKLYKKIGVDTQRRYYKLFQCVRTYFIFAIGRMFTVAGSLQGCALLWKQMFAESRLWVLSDGTFYTYGLDEKDCFVVLIGIVAMFIVDVLHEKGKRIRKTVAAQPLPIRWICYYGMIFVIVILGVYGAGYDASAFVYGAFMERDKRIDVLRAWGIFLVIAGHSGSPFSGFIYTFHMPLFFFITGYLRYNGKVYSWRSFIAKKIKSVLVPYVIFWVVSMLIYNQIKCYMESHTLATIGMNELLGLLGGGHWLADYSNNFPLWYFQLYFIACICFEIVVRYFNKILQLIFLIVTAVVTIPFQNMVPGRPVFHINVLPAALTFMMIGYGFKYLIDKDLHLYDKIKGNYAIACVLIALGWKISTINYGDISNIVSYLYFFGATCTIMGTYIFANLFINNKLFQNVDKNTIYILGLHFPLLEVSVSMMVYFIANIGITNTFVQNLLVILIDLFLCCGLAELYKIIKGLVVAKLKKGTQQNKEMNVYDFDDTIYAGDSTVDFFFYCLKKKPAIIRYVPRQIFGACRYALKRITKEEFKEAFFVFLSALNEPEEYVEAFWNANEKKIKPWYQKQKRVDDMIISASPQFLIEPMGERLNIQKVIASPVDIHTGKYFGSNCKGEEKVRRFYEYLPDGVIEEFYSDSHSDLPMAKIAQKSFLVNGNILNTWNVEDMKKYVRMLRVKHWLKNVLIFAPLFFGEVLFNYTMIAKSFYAFLAFGLAASVVYIINDINDVEKDRKHPTKCKRPIASGEVSIKAAWVFCAMLVLLVAVMSFAAVFLDLYSYVAVIWLVAYIVINLIYSKWGKHVPVVDVVLLAVGFLIRLYYGAQVVQVDISAWLYLTVLAGAFYLGMGKRRNELKNVSEGETRAVLRKYNYAFLDKNMYVCIAFAEVTYALWAMQSEHSGLMFTVPVVMVIFMKYSLNIEADDSEGNPMDVLLEDKLLLVCVLLYAIIAFFSIYVLMEKIRLNADKWNDRFVINFFRIICVIEVILIGYFNLIKLRYYCEYDSSSYFLKAYEMYRQRTLFISDWVDQTSLYFDSPVPLAALLMNVFHNIFPSYGIANCMITAANIYLFRRILKDLDFPEMSRLVALAFFLCPYLTTPFDIVNDLGYYSCLFVSAGFYSVKILISLMYLLSMERLLHSGRKNAWMLLTVIGLFVSGMSSGYHLAMYAVIPGCVYAVWYFWTNRERKDYLSTILYNAACMAALVIGKLVQSHVLQYKSREDVIAWIGLEDLWDNFISILLGNLLGINALPRESNVTALSAEGIAVVLGLLMAVVFVAGIVYACRRKVYKKTAYMFFIAWGAVNALLLLLINSRYGDPVFETRYMLPCIITEMVVIAGAICLNNSGYRNFVIGMVGILISCNVIYSVVNYSGIENNYDELKEVTAEIDKLDAPVVYVYGESMENGEKRAVRVFDTNKTYIVMTDMNAAHKWGDITQYCDNSDWDGPTILLTTQLDYYSLPEFMQLKYNKVWENDEYAVFYSDTNIMDLESGTGDRDYAIDFPYSKDATTGLGEYDETGKFISDGSCGWVLAGPKLETDHSGYYDFALNYTIDAAEQTDSPATFSIVYSVVGEVEEVVQTVDLKKNENRAVLESFYLDEAESGNYNYRVYCSDGTIITIDSVEIYRRDRMLSKIRQYFELIKYCFFGGITTLLNLALLYVFVEMGMNYIVANTIAYIIAVVVNYVFSVFFVFEEKAEGIKQNIVQFGKFCSVRIGSLVLDNALFFLCVSVLGAPLWPSRIILSAAIIVGTYLLNKVFVFIKKMKILLVVNYYYPYISGLSEVVRLLAEDFAKQGHEVTVLCSNHDKLPAEEVINGVNVLRAPIICKISKGTVSLAFIRKAIKMQKDYDVVNLHLPMLEAGIISALGDKKKIVSMYHCDIDLAPGLINNMIKGIMLKMNTWGLKNSRKVLVTTVDYGKHSKIAYKFEDKMVEVHTPIKEYHRVEVERADQFKRIGFCGRIVSEKGIDVLLQAYKLVAEQRDDVKLVIGGDYQNIAGGSIFPQLQALIETENIKNVEFLGKIPEEKMAEFYSSLDVFCLPSINPLEAFGMVQIEAMLCGVPVVASDLYGVRTIVGNTGMGLVCKKGDAQSLADCIMKILDDPEKYTKSHQEIHDLYSTEWCVNAYLKCFKEVMDHAQMEKRKRFNSSHVLVLLLAVISFIILYGIDVLDVTNDTWLLASERDLRAHYIGWKFFRQSPWNFPFGLMDNMMYPDKISIIFTDSVPVLAVFFKVFSGILPETFQYFGLWGLLCFILQGLCAYELIAYYVDNRWVQLIGTEFFILSPSMIYRLYYHSELAGHFLLLLAFLIFVKNRDESNSLKVGIKWSLLCIAAAGIHIYFIPMVGIVMVAMYCVRLKSNCQTGVLKSMLVGFLLEIVMPVLAACGNIYLLGGFSSARTFDSEDGLGRYSANLNTFFNSQSWSGILPQLKLYCNDQYEGYAYVGLGVIILLVITVIACVKKKVSFSRKEIGFAVLVFVVSFVAALSPVVTCGSRLLVNIPYPGFVIHIYEMFRATGRFAWLGQYVLMLAAVVGVGMLADGAAGNKKKIIVVIAFVTIGLQIADLQQMLFLRKNVGDAGQYQESEYNVLQSDVWEKLAHDYSHIVLVEENSLVHKNYVDSFSLADFAVNHGLTINNFPAARPNDELVNANNAKIYENLETGLAEDDVIYIFGNRFELLFKDLKLNLYLIDGFAVGVKGTIDGAEKLDPDVFTTQFGGTFFLHPPEEQEQDGVLFNDVNSSQYMVYGPYAEMEPGVYDITFDYDMIDAGDGSIGFAEVVSGDGAQVFASLEIEPDAVQIRLQNVVIPEKTEVEIRVFVYEGHEIALKRFTCTVDKNNTMEEMATALLSIGLLVLFSIIGIMTFSFFDGERKGDLLFLAPAVGLSITTVLAVDCVALAPVRIMKYVVLGVFIVMLSVRGRKMLATAKNELKYKRFAIYAVAACVILCIPVLTQTGLVSITRTNNDLIYYLADMDWLTNHTFFEKPTFTDVTPYYFVTQNMYVHYSRLGFDVLGSVLMNLTGLQGNQLFFAYCVATVVSFNMMLLFFAERVLEIRNKWWWSLAAILTVSLNMWALLGFQYGPQIFGMLCMAGTVFGMILMWKERKLLWFLFTALMLAADFAVYSEFAYYLFIIFVVITVISFLYYRKEIKVAPMIYKSFGVGCLGLVLCAPASYKVVRYYLYLLDSANEGIDTLNADGWIVVRFREILSDLLGFSFSPDTNVPVSFGILGLIGSLMIWALIIAGIIRVVSKKKNYEMIALLGVCAFFAALELTFAFMGFDYGEFKHLISVQPFICILLIKCLMELEELFTEKGKAQLGWLGGYTVIVCVLLANVIQIMGCFPNDSYRVYTADLNKLDKLSEQFDDDLEILIPEEYICDTQHQIIYALKDDKVVVPGNSYFYKYTNHNKLDANAIIVDKEQSEIDEKWTAGKILYETDRFCIYELDFEKQFFENGDLKYTLGDEEYRKSDDCISMDDYVYCIAQSDGFKIYGPYAPLIKGTYSAVCDLQIVENTTSDKCVGFFEIFDADNDETLAKVKIYENDGNIEIPDFEVESACEHFEARVWLNKGVTAEISDIRITKRMRKPEQIRFDLQSNQNLSRRNIQKAYGLGNISETTLGPNHTLREKFLHVYKYVTGKLVRWFVEPYFVQQRECNHTITNVLEDYDRMHTILMEENDALRRTVEQLQVEMSEVHRKIGMSTLFDVYQKTPRIIQIVASLNFGDAVGNDVRAIARALNEAGYITGIFTLAIHPKIKDEGVYLINMLPELNENDLIIYHYATADELADIIKEAPCKVVLRYHNVTPPAFFRGYDEGAEKVTREGLDEIADLKDAIDYGIVVSDFNKKDLIDMGYQCPIAVAPILIPFKDYEQEPDKDVVTRYSDGKTNIVFVGRIVPNKKFEDVIACFAAYKEKYDPTARLFLVGNYQETDLYYQYLQDVIKKCGVEDVIFPGHIAFNAILAYYKIADLFLCMSEHEGFCVPLVEAMFFETPIVAYASTAIPGTLGGSGVLVETKEPEAVAEKMHQVITDQAYREEIIEKQKRRLEDFSYDRIKEQILKEITDIQEKMQPENAIEVRDLTKKFKVFYDKGNQLKEKILFHNRNRYENRWVLNGISFNVRRGEAVGLIGHNGCGKSTTLKLLTKIIYPDSGTIEMRGRVSSLIELGAGFHPDMSGRENIYTNASIFGLSKKEIDARVAQIIEFSELEEFIDNPVRTYSSGMYMRLAFSVAINVDADILLIDEILGVGDAHFQEKCFEKLQSIKKNGTTIVIVSHSMGQIEDICDRSIWIDKGKIRMEGKPQEVDAKYLEYMGVKSNEEKKKTLLEEQQKQQDKLRKEEEKKEQIEKSEFKIKNVSLNEKELTIHYSVGGICEDAILKFETKDGEWIACTGTDLKKEPIGSFETELKQSQLLTYLAGVNDTHENYLPRMQTSGACERVEDYLVIHPEGVMYGPYITLPTMHYKLQIEVSYEGENRPVIAITKDGGNVRVTEAQLSNGKNFLNFTLDSRAENIEFVLSNGTGADVVVKNIEVKMKKIGFVIPWFGFDIPGGAEAELKGLTLHLHEAGVPIEILSTCVQNFNANWNCNYHKEGTTTEKGITVRRFKVRKRDADAFNEVNLKLMNNQMPTEAEEEIFNREMVNSPALYRYIREHKDEYSLFVFIPYMFGTTYYGIQECYEKAVLIPCFHDESYVYMKSFKREFSKVAGMIFHAKPEGDLAEQVYDLTNVNAQVLGEGVYTEYTYDAARFRDKYNIREPFILYAGRKDVGKNIYTLINNFREYKYRNQNDMKLVLIGGGEVKIPEDIKKDVIDLGFVDVQDKFDAYAAATVLCQPSTHESFSLVIMESWICERPVLVHEQCEVTKHFAITSHGGLYFDNYFEFEGAVNFYLENPEKAKAMGLAGRKFVLDNFAWDVIVEKYMNYFKQVAHEEMKIFQILPVLAFGDAVGNDTRALKDALLEAGYQTEIYAAVIDERLPEGTAQSFDMMEKVEEDDIIIYHLSTGHELNQKLKSLGGRKIILYHNITPEKYFQKYNHGAYLNCRNGLREARELAPVAEFAIADSEYNKQDLIRYGYTCDIKVLPILIPFEDYEKKPNQKVINKYGDDGYVNILFTGRVVPNKKQEDIIDAFYYYKKFINPKSRLILVGSYAGIDRYHEQLEAYVKALDLEDVLFTGQIKFDEILAYYKVADVFLCMSEHEGFCVPLLEAMCFDVPVIARDTSAIAGTLGGSGVLLPDNDPMVAAEMINRIVTDEKLRETIIRNQRIRLKDFDNRVVKETFLKIIREFIGKRDMVEQMEFVDVEGIMSEIRTQIKERGYTKKDLKFADMNTSAVLGAEDYYDYPNFRATLEQVDGKRYVPWWNPIKGNKVVVFIKRFIRKCVTFLIAPIVDAQNELNQYTASALVQIGAKFEQEQDYDYDEMQKKIEMLEQRIAELEKSVENNRMKRFKEIYDYRQMIFSLVRKELRGRYKGSVLGFFWTFLNPLLQLLVYTMVFSTIMRSGIEDYYLFLFVALVPWIFFSSCVTGGATSILNSGDMIKKIYFPREVMPIAYVTSAFVNMILTFVVVFAVLIVSGYGMNARALLYLPIIMIVEYLLGLGIALLTSALTVFFRDLAYILGIVAMAWQFLTPVMYSQEMVEEALPAGMLKIWNMNPMTPMINAYRDILYYKTTPQLSTLAVAVVLGIVILVIGEIVFVKLQRGFAEELMRIVQILPVLAFGDAVGNDTRALKDALSEAGYETEIYAAVIDERLPQGTAQPFERLGKLTANDIVIYHLSNGHRLNYEIEKLGGKKVIIYHNITPERYFEKYNRDACANCVQGIKAAKRLAKTADYAIAVSEYNKQDLIRLGFTCDIEVLPILIPFEDYEKKPNAGVLRRYDDDYVNILFTGRIVPNKKQEDVIETFYYYKKYINPKSRLILAGSYVDVGKYHEKLELFARKLGLADVIFTGQIRFDEILAYYRLADVFLCMSEHEGFCVPLVEAMYFDVPIVARDTSAIGWTLGGSGVLLPDNDPVVAAEMVNRVLTDEALKEKILKNQRTRLQDFDNQKVKARFLQIIEKIIRENMEQINTEEIMQEIQAQIQQRGYVRNELKFEDVQVETGTGEVHEQIDDYFELDQFGVTVDHMKHTRKVRCWRMLDGSRLSVFFKKMIRKMIKFYVEPIIDEQNQFNFYTTSAMAQLYAKMQDEQAVRIMELQQQVEALEEKCRRLEEKCGEMKQKMVRFIADHKQKLKKLLPKKLLRAAKLAYLKRLMAKYQKEPIHPAEYQKKEAGVNLIGDIRAEIGLGQSMRLLANELELSKIPFGIYNFQLDGNVRRGDHSFEHRMREDYPYRVNLFHVNPQEVGLAYLYLNKDIWRDRYNIAFWLWELEEFPQEYQEAIKFFDEIWTPSEFASSSIRKVTDKPVYTLPYYVTAGKDENCGRADFGLPEDKFLYLIMYDTNSTMARKNPVGALDAYKKAFPVEDEHVGLVIKMNNPKQEDLEVLREQTKGYQNVYLIAEVLDKPKVNSLIAAVDVFVSLHRAEGFGLVMAEAMLLDTVCVATNWSSNTEFMDADSACMVSFQKVEIQETSGNYKKGCRWAEPDVEEAAGCMRRLYEDPAYYDRLAKNGKTKINEVLGAQTITALLKERLAPILQAADDAQKTAQMKILIDARTLGKRPSGVGMYLYNFICGLMQYDTMKMELLTDVVESAAMKELDEAHIPIHRYGTPVEKSIGVYAYFRFVQNKINEVKPDLFWEVNNLTPVVIRNPYGKTAVTVHDVFPITAPYGYGRLYPYYFKWNLGKTLRHMDAVIYNSLDTKTQVEQYYPAAKALPSCISYIITEERPSLPVCDEGYFLYIGNLEERKGTDLLLKAYVRYRKDGGTKKLYLAGKIRSDAIETLLGECQKETDGVCYQGYLETEEKYRMYAACSAFLFPSRAEGFGMPVIEALTYRKPVLVSDLPIFHEIAGDAVCYCKLDTEDAVPQLAAAMRQIGEAGKESVPDSLCEAVVGRYKKERLAGGLKEFLETIGKKMIQVTAITAAYNAASYIENCIQSVLAQTVPCRMVIVDDASLDDTYAIAMRYAEEYPDRITVLKNEQNAGAAASRNRAVACATTPYVAILDADDWWQEDKTERQLKRLAETKADACYAGRELMHADGISTTKIVQVPETVTYHGLLKGNVIPCSSVLMRREDALQYPMTHDELHEDYIVWLSMLRDGKTFAGVNEPLLKSRLGETGKSRKKGKSARMTYGVYRYMGIPVWKAVYYFCCYAAAGCKKYAGARGKKMRLREQYKHLLNYGANLITLLVEGFCFGYIWYTVYEEQFGFWRRGNWAVVGLYVLVIFFFTKVFGGYNIGYMRMTDIALSHILSILLSGIVGYLELCLICRDYVEPAPMLGVMAVEIVFILPWIYIIRKLYAKLYPPRQMLVIYGHYAPDELIAKINTRRDKYNICGSVSYEIGHEKLYPMIREYNAVVLCDLPAQARNQIMKFCYQESIRTYVTPKISDIIFRGADDIHLFDTPLLLSRNQGLSIDQRIIKRTCDIVLSLIGIVIASPFMLIIALAVKLYDGGPVFYKQERLTRDEKPFMIYKFRSMSMDSEKNGARLAAKGDKRVTPVGKIIRNIHFDELPQLFNILKGDMSMVGPRPERQVIADQYAEEIPEFVFRTKVKAGLTGYAQVYGKYNTTPYDKLKFDITYIENYSLWLDVKIMLLTFKILFQKENTEGVDETQQTALKDMEAVYQLLKSEFRQFGTGGISLVLALTALLFLMAEWKRLSRGCRMYTAYAACMLVLVGNPFGYNDISTFWMETSYWKMFFLLLPAVAAAIPVTELAVGTKHVWTGALGVLVCAALVAVSMSFQFTAPKLAVPENAYHVEHEIAELDDALRESGRNIQNMIAPRAVCAQIRELDASVNLLYGEDLIERMIAQDTVTEDETEKQFISDCASIVAVPAAVDNQIAMAEKYNSNCVILEADYDDQTLMESAGYDCYGTAGSYVIYFREMLTILKTVILAFVWLVLPILTGCLFGLFPQREYRKRRSAYLIGSLTIWALFYGLARIALDGKWTLTKLTKVFCVLLAVLTILSTGVIIYRWHMRELIRIKSRTSLLFTAVAAVLILAVAGGFAANRTDEHTVEQVMTMYMTDSLYEYDAMTGKSRDAMMDYEKEMLDAQQAAPVAAYYAVYVRMSNLHPAKFVRILLPVFLLPFYMAVYAAWAEYLFKHDTKKKWCFQIVVWLLYAVSLIADWSVAFGLYQNCWNGETLFFLGELPLTVLLALGEKKQLREIEAFGQPYVILYYVVSAAAGQLLYEKGFFFVTFVWGVALAAALIKRWRDGGSLSTVKKMAEIDFFYQNFWKYWNGALYLVPYLGCLVYLVYKKDKKLMELFVWPFLILLATVYNPFLMRPIIEKMGWEDRYMRFYWLLPAEFLCAYLLARLVNRKAKREVQFAVGVVVLGIVFLCGSSLVKYIPDENVYKIDSWVLETSELIAEASKKENPVILVDQEMYSSIRQYDPTVIEAVNNTEMARYMFTDTEELPVDGQYDDHSTAVSLFVKGVEVDASIMNEIFAERQVDFFVRNTRYYSAEYLQQLDLTYVGAVEGYEVYRCAKEMNSALGIVIGLVVLSCIFWILGAGVCRLMGRKEGPGFLWLFGMALFLGIFSVVDIFTEAGGAAFHVLFYTALAVLVIAVALGVVYLVRAGRKEGGSWMRYPARDVWLLLFLVLLVVQIWYGMGNQLYVSRYDTSYYNGNAINALYTDTMYQYDAYTGVYVGKAVAWHDSYSMLIAFLAKLFFMHPLVVVNRIMGVIEIVAANLAVYEIALRLSKGNRAVAVWTAIIRALISVLCWNLGEVPGYYLWTRMAESKSMLANVYLPLALLAIVLAAEETEKKQCWIMLGVFAFAGATMSMSGVFMIPMLLGVGLLPVLLRRKKLKYWGYAVLSVLPCLAAGVLSFLMKTDEKQIRHGVALLAVIILILAITGGYMAIDCYLVGDEVVTYGMANSTDKGWMLSTGRIRAYFEDEILTDSVAQTIQNIAAFGMDLAKNRRGAAYFSYPRPEECGWYGKEQISDWFSIREDERLHLGDVYLNAMGDDANSYLYYELVHLSGSLFPAISATKWSAFLVNAVALVAVLLLLYGIAGYFTADTKRQLLVCLLFGCSVGCLDLSTYLRAYMLAMAFQLALLLVHLKLYQAMRDGMEKAVRRDIAGLLVLYPLGYIAHYTTGVWAVVLGIATLVWLKKNLTGQERKKNTRRYLICGILAVGIGILLDPMSVLGLFSKLSGTGTSPAQAIKESAAGFVASVFGNVLWMAGFCILFVINLVRSVRKAEKKDNRLVWLEWLLAGYCALIVLTTRFPYFKVAYPLMFLVIVMELNFFAETTQRPHRIKMVYSILAVVFTCSSLVYTYYNKNTEVRVSDQVEAALEAADTDRLILIREHAEGYECFPLLGRYESVYVLTNGEEKLDALLADTLIGEQKDITILITNTKADARTFQRWVSGHGFEDDMDILCKTGKYEVIKWHREMAEKKSLVKNSIFNMIYKGFTALFPLITTSYISRVLLPAGVGRVGYANTIVAYFVLIASLGIPTYGVKAIAQSGETKEGRSRTFWELFFINLAATLMCIVAYYVFVDNFPHFADRKLLFQIMGLMLVLNIFNIDWFYQGMEEYSYIATRSIIVKILSFVAMLLFVKKAKDYVIYAFILCVATAGNNLLNAWNLRKYIGKPDVGLHPGRHLKPVLILLASTIATEIYTMLDTIMLEYYHGETCVGYYSNPVKIVRMTYTVVIALVAVFYPRISYHYKQKEYDRCNELLSRGFKIMLLLALPCTVGIGITAEYIVPFLFGEAFLPSIGTLRILSVLVLVFSVAYFLGHIVLIATGQEQKILHATIAGAVINAAVNFLLIPSMQQSGAAIASVLSEIAVTTVLVWHARCSYHLAIGRNYVISLGAALAAMTAVVCWLKHLSWAVPVMLFVLIAAAAAVYFGCLLLFRNDTVMELLHKGLERLQNRMKNKITIVCCYNDRKQYGRLQASLAKQNTGYELIGMDNCSRQYASCSLALNAATARVETEYVIYAHQDVELPGEDTLARFAGYLAQTGKEDLLGVAGIVPGTIPGRKKRFGEAEGIVLSGVQHGAGELAAAGEQAFSGMRACDSLDECFFGGHTAHFKKNPFDEKLCDNWHLYGVERCLHTRWHGGNVYVCDVALIHHSTGHINHAYNENFRRLAKRYAGMQCIRTVCGSSKTGVWHRNVFYWKRELLIRLGRLGMRTICYVILNYKTYEEAAACAESILSTQTWKNMHIVIVDNGSGNGSEEWLAEHFIDEKRVRVIASGENLGFARGNNLGIRYAREHYDPDLIVAANSDILFEQPDFCERLFEIYDRKPYAILGADVVDATRTQHFNPVAEKRSYTLNYMRKQILSSWIRAMSYRMSKLFLGKKNGGDLSRGTGATREVDGEAVAADSRVGEEREGVLLHGCCLVFSRDFFKVYDGFWEGTFLYAEEEILYYLAAKSGLRMLYSPEVTCIHKEAVTTRKLYSDVCDAKIFYYTQITKSYRAFLGLMKKYEKMKVLAIFTCYNRRELTRQSMELLGQNKNVTFDYVIVNDGSTDGTDEMLAAMPYEIDLINGDGGLFWNRGMYEAIEHAKKAHPDYEYYMLMNDDTKFVPGIFDEMLPLFAPDKVMVGAMCGDDGRMSYGGIKYVKGIKYKKYGPEAQDICFDTFNANCAIIPHDIFMKVSIDPFYQHSIGDFDYGLAISRMGYEIRIFPKFIGQCNDGSLKGTWQDESLPKMQRIKLKESRKGLPFRDWFHFLHKYFGLGTAIVRSITPYVRIILGTKTRYSGAMAEKKTAPVILFTYNRPEHTRRTIEALAKNELAQDTELFVFSDAAKKEADRGKVQEIRDYVAQAGGFFKVTLIAREENYGLARNVIEGVTEIIERYGTVIVLEDDLVTNRYFLRFMNDALSRYEKNPKVTGVTGFSHFADTVTLPCESYFHTLTGTSWSWATWADRWRHFDATCSDWTRMKEDAKLRRRFNYDNTYNFYKIMKDQQTDAGTNSWAIRWYWTNFKRDGYILSPLRSLVSNEGWDGSGVHCGESREPVFDHHLATDHAVTEFPDEVAERPEVHRLMKRALLHESEPNLLKHIYHIVFRRNYIGQIMKKMVITGVNGFIGRHAKEYFEKEYEITGLDLAANYCGDRLPGDTMAYYQCNMSQESAEMAAIFTGVQPDVILHCAGSANVGASVVNPMADLDGNLHSLYQLLLALKSFEKRPQIIFLSSAGIYGNPRQLPVRESDAAAPMSPYGLHKHMAEELCEYYNRIHGYRIRSIRIFSAYGNGLRKQLLWDIYQKYQNTGRIELFGTGEETRDFIHVSDIVRAIELILAYDGPENVINVANGEEVSIRELAEIYAGKLGADADVVSFNGMVKEGDPRNWRADISLLKKLGYEKHMALSDGIEAYVEWAREQEMKKILFNGLGNRGWIGGLYYLKNIIFSCLESEKIKKEYRIVVLIDSAHADIFTCFGNRIDLHIYDGTNKAKLALYEMNLIWLHGVKYCYALELNKIGSLFASRGIFWIPDFQHKTLPEFFQPEELARKDVTDRKMTELTNTLVLSSEDARHDLERFYPEHKCRTQVVHFVSYIEPELRTITPELERGVADKFGLHKKYVYLPNQFWKHKNHVVAVRAIERIKKQGLLADYDFVFTGNLEDYRNPEYINELKAVMEAAPVAGSIRLLGFVERTEQLCIMKNAVFIVQPSLCEGWGTVLEDAKVLDKAVLLSDIPVHREQKNEKCTLFDPHDPDALADLIVVTAERADRPEEAAYFAGDMMAGMANMYREAGEYAKALEKIFVMIKAVFITNIPSPYRVDFFAYLQKHYPEYEFHIIFSGAGMENRKWSVELAELSHYHFLKSKTLIIRKRFDDRYVFLPVGVEKLLAEIKPDLVFAMEYNPTILRAVHWCRKKRIPFISWTDGTLNSEKNIGKVQRLSRSYIIKRAAAFVASSTASKQAQIAYGADEKKCFLSYLTVDIQKYLREKEDYSGRELLYVGSLIQRKGLDLLLPALAETSEDIHLTIVGEGQERELLTEQAGKLGITDRIRFLGYVEGEPLRELYHNADVFILPTREDCFGLVILEAMCASLPVISSKYADGAFDLVAEGENGYIVDPEDTHVFAEKIDQIFADENRLKEMGTRSYERAHAFAFEEVAKGCIDALCYVMGKAVRMKNYRILQIHNFYQIPGGEDVVVRNEKRLLEEHGHKVYTYYRSNSELAKKGIVGKLFLPFTAVFSLKTYREVKKLIRENQIDIVHVHNTLTMVSPSVFYAAFRCKVPVVQTLHNFRMLCPAGSFFRDNVICEECVQHGMGCAIRHKCYRNSKLQSFVSAAILQIHRFVGTYRRVNFICLTEFNRKKLLESLDTKKEIVNPERVYIKPNFTFAEEIVPNEVRSDEEYFLFAGRVEALKGIDIAVRAFEKLPDKKLYVAGNGPMMEEMQRYVREHHMENVKFLGYLQKDEMSEKFYQAKAVIMTSQCYEAFAMTIAEAYSYGVPVIAGRVGNMDGMVQDGITGVKFTYNSAEDLADKISAFDAMDLSVLKKNARAFYAERLRPEDNYQKLIRIYEDISKMDRIKTFFRTSDWESVGVAAFYGYFAINILMKALAYDHGDNIYKFFFIFAMSFWAIKIVTTRYTLREIAWIAVLLALGLGLSVITKQNTWLLLFMTIIAMKNCRFELMIQMAVYIRVFCLAMLVIGSTFGVFDIGYKTTPDSSYVEIPVYSFAMNEPNTAFLAVFLTLLLLLYYNYKKLNVWWFAGTSATALLFYKFTYCRTGIAVFFFVWALIIFEKIAKDRWKVVLALSVPVGAVFSLCTMLFYDGGNSVMRLLNHLVSGRIYIMSSYYKTQGVSLIPRAQELFYGQYYGLIDNTYMFVFLYCGAIVALFFLWCVTKTLFRLYRGGYYKELVMIAAFALYGVLEQFIMNGFMNPFVLLCGILLYPDLLEKKRDDVCAAEMGYVLALWGEFVKFTGGRAGLVHLLLFAAALVCCFFLGKEERHRLFWPSVLVGIFFFNPVFYKYVGTRFLSGVYWRLLWMLPWTFVIAYAVVRMAYRLGKQALRIVVVAVACVCIFVTGKPVLSAETYGERSNVYELPQAAVEIADLVQSRLVDWQETLIVPNELLCSVRQYSAAACLLYGRNAEGFISNIGEEEQQVYEEMSSEHPDVARVTEIAKNKNCRYIVFNTSFHQIPEDLTEYGYEKIAVIEDVYAVYSRIGSMSCKSLLYMVGMFVFVPVWIGLLWTDFLKIRERASQLLHAWVLGFATMLAAAQLVLVPFVMMQKTLTQALLLWRIILQILAVLSFVIWLGRRAGTAETVADAAAGTADGAGVQKKVCGKAGTWTIVFGILVAVLILLQAYIPARYEHSDDDDSRFVAEEVSAVVHDTMYREDPITADYMYWDTGEVRKDLTSPWAMFVAMHAKEGNMAPAALSHAYLPFFLILICYALYLLIGQVLFGGDWEKTFLFGIVLSVLHLAGYTSTHTLASMLLLRIWQGKAVCASFALPLFFYLFYQIMKKEVWKHWIPLLYVAGVGTCMLSGIGIVTAPVLLAVYGVLDFCYYRNWRKTLAIWLAAVPCVIFLGYYLMMNQEYRLDREYSIAEIIQCNLRKWWLALICAAVCAAVLGGYKYKSLKPFIEQSVYENVKQVTATLYVADYSTSASTERANNVIKMAQSYRAYELVQQKTGCDLDYKTYQGIFDVLQGEAGDMVTIYLQYPIDTGTFSIADEDGAIAFTQEIIDATLQVGSELTGGETCFTVLDAPYPNSETRKAENYFISEDDFKGGVKKGIAAGALLGIIAEVALYTFWLILYRKPKSAEEVRACLDIPVIDDVKTRKANEEEVYKKLALFLKEKQGGADHKGVSVNCMPVGYFKKDAGLKLAMSFANEKKKTLLIDLVKEPEGKEAGNSISRYVLGDESRPVPTTQNSYLDVLCRDVAEEKNFDVVMNERFASYVKEMQDTYEYIVINSPNVAESADAFAAGKLCDKNFVVCARGGVNNETLYRLKNEAAVQGIVLEGVLVYELMYQSKEKIQTVVLLLADLICFVISYFGGGYLWLVLYRNVSVQNMKSELMDSFGIVLVIYMLILLFSDLEKNFIRRNLARDFWAALEASVIMIFVTALTIFLQHNNADASRGVYFCIAGMNLVLFFVAHAAIKYYLLHIYRNKRGTNQLFLVTTTDRVKDTLAEIENAKDWEHRLTGIAIIDDNQIGTWYEGIPVVATYDTMFQYAKEQIVDEVFLNVPYDTGESLAKVVEAFEDMGATVHITIELLKRFDDYHKNFNMMGNVPVVTFSNQYYDWKMLFVKRLMDIAGAIVGLAITAVVTVFLAPPLLIESPGPLFFAQKRVGKNGRFFKIYKFRSMYKDAEERKKELESQNEMNGFMFKMKDDPRITKVGKFIRKTSIDELPQFYNVLKGDMSLVGTRPPTVDEFRQYESHQKRRLSAKPGITGLWQVSGRNEIKDFEDVVKLDVQYIDNWSIGLDIKIILKTIKVVFEKGGEMERTIYSKYSNERAERFRIRTDIVTDEAGEKKVYKYACTIQAGDHIRRQEELGKQLDAAYAGSRIAFCPCTTEDVPEGCRSVSPFVQGDNLQHLMEQAVAAGDWETVEQMVAAYADRVSGSGGEIPFDRTPEFAEVFGEEKLPEGMPCAAVSDVDMIFSNIFVESGKAAADSAWTVIDYEWTFPFPVPKKYLIYRAVYYAYYQIFKAEGKSLADWLKSAGLTEEETECFARMEEHFQEYLRAGAFPVRSMQRRMGTRIIPFAALLEGAGAGDGGEIVRESAYLRVRKLLYHIDRAESQDGSRVCSGWAFAKTWDGRCLPVNIRVAAPGGEQFAAEITRRARADVAEMFKLRRVENPEFGFDCVWQAAPEQRFCLYFSLGNRESIYEGMEDAEVLKELYESIKQNSKADYAGIIEQRASYPYLYHLSQIRENLVSFLPFDKDMRVLECNPECGALTGKLLAMAGSVTVLAESELQEKILRERFKEPQEREKLDIRRQLPEHGRFDAILIAGHFYRWEKQLPALRELLAPGGKFYVADANRIGLKYLAGCQEEYCGGYFTGIDGYPDAAAVGRFGRSYSRAEYTRLLQEAGFGGLTFYYPYPDHKFPSVIYSDEWLPQKGELAEGRSNYDRDRVACFNERVMFDSLLEEGVFQTFSNSFLIEAVQEGMDELAIRVEDVSKVYRLYNRPSERLFDALGLAGKGRFKEHRALDHVTFDVKKGETVGIIGTNGSGKSTILKIITGVLSPTSGEVEIDGRISALLELGAGFNMEYTGIENVYLNGMMMGFSREEMDARLDDILKFADIGEFVNQPCKTYSSGMFVRLAFAVAINIDPEILIVDEALSVGDVFFQAKCYKKFEDFKAEGKTIIFVSHDISSVAKYCDRVILLNKGVKLSEGNPKDTINLYKKVLLNQSQNIASGQVLADAKENGTKKLWKSNYELNPQVNEYGTGEAEIIDFAVIDEYGSYTSCIQKGTSFTIRSKVQFHTDIQDPIFTYTFKTVQGTAVTGTNTMYEKVGVGLARAGEIYVASFKQNMDLQGGEYLLSISCTGYVGGEFRAYHRLYDVVGVTVISDKNTVGFYDMNSETTVERVEEMAGKKKDTSLLHHLIGSRSLVWNLAKNDIKKKFAGSYFGVVWAFVQPVITVLLYWFVFEKGLNSKATDLRTGIEIPFVLWLTAGLVPWFYFQEALNGGTGVLVEYSYLVKKVVFQIDMLPVVKMISALFTHLFFVAFTIVLFICMGYMPDWYALQVVYYSFCMILFATGLVYATSAVTVFFRDMKEVVGILLQIGMWVTPIMWNFETMVQIPGWAIAVLKLNPMYYIVSGYRNALINHIGFWEDMGITVYFWVVTAVILFLGTTVFKRLRPHFADVLMGKIKVTENCNGIEGLKVIEPAVFGDARGYFMETYNYNDFAEAGIDCQFVQDNQSASKKGVLRGLHFQINYPQDKLVRVVNGEVFDVAVDLREGSKTFGKWYGVLLSAENKKQFFVPKNFAHGFIVLSEEAEFCYKVTDFYHPNDEGGILWNDAEVGVEWPMPEGMTAADLILSDKDKVQKSFAEYKAAHGIKMKGIILAGGSGTRLYPLTKAISKQIMPVYDKPMIYYPLSTLMLAGIREVLIISTPRDLPVFEELFGDGSQLGMSFSYAVQEQPRGLADAFIIGEKFIGNDAVALVLGDNIFYGQSFSKVLKSAAERTEKEQGATIFGYYVRDPREYGVVEFDENGKALSIEEKPEYPKSNYAVPGLYFYDNDVVEIAKNVKPSARGEIEITSVNNAYLERGTLSVETLGRGFAWLDTGNHDMLLAAADFVSAFQKRQGLYISCIEEIAYKRGFIDRDQLIKLAQPLLKTDYGKYLMEIAEGLMRTYLVTGGAGFIGSNYIHYMFRKYGDTIRIINVDVLTYAGNLENLKDIENNPNYTFIRADITDKEAIAKIFAENDIDRVVHFAAESHVDRSIKNPEVFVKTNVLGTAVMLNCAKAAWELPDGTFKADKKFLHVSTDEVYGSLEDDGSYFYETTPYAPHSPYSASKASSDMLVKAYIDTYKFPANITNCSNNYGPYQFPEKLIPLIINNALQGKKLPVYGDGKNVRDWLYVDDHAKGIDMVQEKGRLGETYNIGGHNEKQNIQIIEIIIDTLQEMLPADDPRRKLVSKDLITYVADRKGHDRRYAIAPDKIKAEVGWEPETKFEDGIRKTIAWFFEHEDWMKNVTSGDYQKYYEDMYQNRMYTSLYWNGIYDKMKRLMAVKRPWIIETASIGNKWRMRMKSVVMRDLRDYVRKYWGLLAASMAAMLICFGYLVFCGNIRIDTEELINHPGSSLGWLAIGRWELAWLKHLLGLGTHQVIKSGILFFLFFWLGANLLTFGIYERSGKKKSRYWIFLLLYVTSNIWCYQIYFSLQQAEVALAMLLLIEAAFLMSGIGAGTVTNLLRTFAAGVLLFIGLGSYQALAVYYIAVCLVFFLAELTAEREQGGYLRQILWMIVHFGVVYLCYHWYMSTFLVSSDYMDSQMGWGRLPALACIKNVLRTLKNLLLGHGPRNFSFYGCGVVLLLVLAGSVLACRKKQELPWEKKKIRYSLLGLAGLVLAPLLLTAYMGEMIVTRSQFALPVAGAFLGMYVTERLAELWNGRDRGTGYWLLLVCRLCICLVIAVQTGYDLRLAVTDEIRCREDEQKTQQLLERFAGADGGKLQQLPVVFVGYQEADLPEWCRRTEMYGWSFYGWDYSMENPTGATHRICGFVQAYTGNVLREDATEEQKRHAVELAGQMKDFPEEGSVLVTEDCVVVRLSEVKEQMPTDWWMKKILVTGCNGQLGRAIRAEYAKEDVTFINTDVVEGDGVTALDIADVAAVLALVRAERPQVIINCAAHTNVDACETQWDAAYRINAIGPRNLAIAAAEVDAKLIHVSTDYVFAGNGTRPYTEFDEPGPVSAYGKTKLEGERFVKAFARKYFIFRTAWLYGDGKNFAKTMLRLAENHEEVSVVCDQLGSPTSAVELARAIHHYEPTENYGLFHATCEGDTNWAAFAEAVFARAGKNTRVRHVTSEEYAAMNPASAKRPAYSILDNYMMRLTDGYRMADWESALDEYMQHLGMVSQKVTVKNPTGLHLRPAGILCKEAMQFKSHITFRYRENTANAKSVLSVLGACIKSGDEIELVCEGEDEQEALAALVNAIENGLGEMARMFGTDGVRGVAGSELTIELATKLGQAGAYVLTKETEHQATIIVGCDTRISGGMLASALMAGICSVGANAIFVGVMPTPAIAYLTRKHKVDAGVVISASHNPMEFNGIKFFNGEGYKLSDALEDEIEALIRNNMKDVVLPIGSGVGKIEYRFDLKDEYVKFMEKCVPVDLHGKKIVLDCAEGASYYTSVKALSDLGAELVAIHTDPDGTNINANCGSTHMDELKARVVYEKADAGIAFDGDADRMLAVDEKGNLVDGDQVMAICGNYMKQKGRLKKNTIVVTIMSNLGFTLMGEKEGIHVEKTKVGDRYVLENMREHGYNIGGEQSGHVIFLDDNTTGDGLLSALHLLEVMVDTGKPLSELAAIMEVLPQALVNAKVPNHKKEHFMEYPEIADAIAELEKKFNGEGRVLIRPSGTEPLVRVMIEGKDQKVIDEEAKRLADLITRIMLMLKRLGKTITNNFSLKILAVILAVVLWVVVINIDDPTTSKTYTTNVVAENTDYITSQNKYYEPLDSSNVVSFRVSAARSVHDELSNADFSATADMENIEYDEGSGIYRVPVTITAKRYSNKVSVVSKQLYLEVALEDRGTCQKAITAATKGTVMDGCALGTVQIVGSNLLKVSGPASIVSQIDTAVATINVEGMSTDVTDSVVPVLYDADGNVIDTTKLTLSLSTVNISAQILNTKDVPLEFEAKGEPADGYVLTGVESSLDNVRIKGEAATLNTVSKITIPQEVLDISGITEDLTTTVDISSYLPSQTALVLNSDAKVEVTAKVEPVVKATYEVPVANFTIQNVRDGYNANYMESTVAVEISGAESELAGISAKDIIGTADASNLGAGEHHLNVEITLEQEHCWVTGTVTLPVTITDHNTAETGTSDNTDTTDSESKTNDTAGTAAAGDAADKSDKTDKTDKTATENGAAGSDAERSSNNPMQNMLATLDAFWQKASLYMNLPKISITDIVEIIIIAFLIYYMLVWIKNTRAWMLLRGLMVILLFVLLAALFQMNTIIWIARNTLNVLVIALVVIFQPEMRKALENLGRKNVLAFLFSFDSSKEDTGKFSDKTINEMVKACYEMGKVKTGALIVVEDEIVLSEYERTGIAVDGILTSQLLINIFEKNTPLHDGAVIVRGDRVVAATCYLPLTDSLSISKDLGTRHRAAVGISEVSDSLTIVVSEETGRVSIALGGELYRNVDAEFLKNKLTYIQRRERELSKIALWKRRLKDAKTARKNDNKMTTLLELKEKLVRFYGKYEVYITPIVKFIVAFAALMTIDRNIGYMELVSSTPVALILGLLCAILPVGGTIFIAAVVILADMYALSIEVCLVALLLFVLIYFIYFRFAPRQGMGVLLTPICFRLNIPYVIPVGMGLLEEAYSVFAVICGTVVYFFLDGVRQNEKLLGGAAEESAEANSKIVVALNQLLGNKEMYLVLGIMAVTLIIVYLIRRMSIANAWQIAIASGILFETIGLIAGYMLLGISGKTVSVLVGNVISLLIAFVIQFLFFNLDYSRTERLQFEDDEYYYYVKAVPKAVVSGTNKQVKRFSGKDEKERLTKKRFAEEMDIDEELLDMVNEERLRHLIKMAQFDTNDGKQCKPMTQYARKDYVSMRLLGSFVTGTICYGLLMGMWGLYATEELLAKLNKFDIQGLVMTAVVPYLVFMVIYLGATWVIFNMKYTEGRRKVKKYYNNLKKVNQMYEREERLRTSDHKDWDMEVRNCRSCGRLFNYMGGAPLCPACQKKLEEKFQEVKAFLEENPNSSVETVAEELDVSVKQIRQWIREERLSLSVAGADGIVCETCGKPIRTGRFCEKCKNNMANALAESIHKPEPPQPQETERDKNRMRFLKMTGGRAGNAMQADFATGKEKTGRGLRWVAETIVGLVYPPRCPICDRVTVPECVPCRRCADAVRLAEEPVCKRCGKPLDGERAEFCLDCGKRRHAYCQGKAVFVYQGNIRQSMYRFKYANRREYAAYYAREAAALYQDWVFKNQIEVIVPVPMYRWKKRRRGYNQAETFARALGGELGLPVDAGLVRRVRNTVPQKELNGGQRAANLKNAFQLAADIVKYKKILLVDDIYTTGTTIDTVSEVLLKGGAERIYYICVSIGAGFMKKAHKLISAVLVSTMVLSMTACGSGEKTYKVGILQQLEHPALDQATQGFQDALTKLMGDSVTFDVQNAQGEQANCSSIATTFVSNNYDLILANATTALQASAAATSTIPVLGTSVTDYATALDIDDWTGATGKNISGTSDLAPLDQQEDMLVELFPDARNVGILYCSAEPNSVYQATEFGKYLDEDGISHKEYTVADSNDIASVVQSAVSEVDVIYIPTDNTMAGNTEAIDNITRPAGIPVIAGEEGICSGCGVATLSISYYDIGYKAGEMAYDILVNGKDISTMDIEYAPNVTKEYNADICSDLGITVPDDYVAIGAEMNYFMSLDPLALFRSMPGAFAQGMVWGLMALGVYITYRLLDFADLTVDGSLATGGAVAVMLIRGGMSPWAALIFAFLAGMVAGFITGILHTALGIPGILASILTQISLYSINLNIMGCSNQAVSVDKYPLVVSLRYLSDSNSTRVQIFATCILFCFAIVAILYWYFGTEQGHAIRATGCNQQMARAQGINTNLHTVIALMISNGLVGLSGGLYAQYQGAADVNMGRGAIVIGLAAVIIGEVIFGRLCAGKNLAFAYTLFSVIGGAIIYYIVMNVVLWLKLPSDDLKLFSAIVVAVFLAIPYLKSTRKGKERMAEMLKIDNIKKTFNPGTINEKVALNGVNLSLEEGDFVTVIGGNGAGKSTTLNAIAGVWPVDSGKIYIGGDDVTRLSEYKRAKYLGRVFQDPMTGTATTMSIEENMAIAARRGQSRGLSWGITKKERDIYREMLATLDLGLEDRLSSKVGLLSGGQRQAITLLMASIQKPRLLLLDEHTAALDPKTAAKVLEISDKIIADHHLTAMMVTHNMKDAIAHGNRLIMMHEGRVILNIAGEEKKKLTVEDLLHQFEKVSGEEFANDKALLSMEKLAGYVEHIIYRNADNGYTVLNLVSGEEEITCVGIFSAIAEGENIEASGDYTDHPTYGKQFKVESFEEKAPEDEEAIERYLGSGAIRGIGLALAARIVRRFKADTFRIIEEEPERLAEVKGISERKAMEIADQVNEKRDLRQAMIFLQQYGITMNLAVKVYQQYGQEVYGIIRENPYRLADDIEGVGFRTADEIAVRVGIRMDSDFRIRSGILYVLLQASTEGHTYLPEEELTRRTGQLLEVGEEQIEKQYMDLAIERKIIMKQGENQTQIYAASFYYMEANTATMLKQLNVSYEVPDLEIEERVRRIEKQTGMELDEHQMTAVKEAVRNGLLIITGGPGTGKTTTINTIIKYFEMEGLDIFLAAPTGRAAKRMSETTGFEARTIHRMLELNGGVDGAAGFERNEQNPLETDVVIIDEMSMVDISLMHALLKAVAVGTRLILVGDVNQLPSVGPGSVLRDIIRSHECNVVMLTKIFRQASTSDIIVNAHKINQGEEVTLDNKSMDFFFLKRYDADVIISVVLQLIKQKLPKFVDATPYDIQVLTPMRKGLLGVERLNGILQRYLNPPSPQKREKEHGDILFREGDKIMQTRNNYQLEWEIRTKYGLSVDKGTGVFNGDMGIVREINDFAETMTVEFDEGRMVEYPYKLLDELELAYAITIHKSQGSEYPAVVIPLLSGPSMLMNRNLLYTAVTRARKCVTLVGNEVTFAQMVQNTSQQKRYSGLCDRLKEAMSFSIDGISSLVSNAQNSAAAGSASALKNSISSVSSGSSEEELLSVCKDFESYFVEEVLKEVKENLISDDDEDKDSSLSTLTDFHMDSTIELMADEIVDQVGENYTQQLYEQMKRNYGIEMMRALYTAATGMLAQQTNVDNISNNLSNVNTVGFKQEKAEFKSLLYQTIQTKTTSANGEQKPIPAQVGLGTRVAAVTSVYTQGALQASENDTDFAIVGDGFFAVRCADGETRYTRAGDFVWAVGTNGVTLTNPDGYPVLDSNNQQIVLPANISSSSVTVSSDGRIGYTTANGTYVNMNRQIGLFQFNNPSGLEKTGDNLLEVTAASGAAMNENTTAGLTRSQVRQNYLEASNVQVADEMVNMIIAQRAYQLNSKAITTSDEMLEMANNLKRMVKGLYTAYTGMINEQKRLDVLSNNLANADTNGYKKEGTTSQTFADELAIKIKDTSSYGLAQKLGTISMGVHIGETYTDYSTGSFKVTDNSTDFAIKGDGFFAIAYTDKQGNSSVKYTRDGAFTVNTQGYLVTKDGDYVLNANDARNGNVNGRIQVDPTQKITVDELGNIYQNDQQVGTIGIVDFADYDYLAKYGENMYDLVNGGTVTAADGRIVQGTLESSNVNVVSEMVNMITISRAYQAGQKVINTIDETLDKAVNQVGNVMMSTDIGIDLGTASILVYIKGKGVVLKEPSVVAFDRDTNKIKAIGEEARLMLGRTPGNIVAVRPLRQGVISDYTVTEKMIKYFIQKALGKKTFRKPRISVCVPSGVTEVEKKAVEDATYSAGAREVAIIEEPIAAAIGAGIDISRPCGNMIVDIGGGTADIAVISLGGSVVSTSIKIAGDDFDEAIVRYMRKKHNLLIGERTAEDIKIKIGSCFPLAQNETMDVRGRNMVTGLPKTVTVSSEETEEALKEPTLQIVEAVHSVLEKTPPELAADVADRGIVLTGGGSLLRGLEELIEDKTGINTMTAEEPMTCVAVGTGKFVEFLSGKRDDDMKYMASKIYMDENSLYPGSTSRRLVFAPEGMSYEKLYMKKTSERKYIKIRGANEHNLKNIDVDIPRDEFVVLTGLSGSGKSSLAFDTIYAEGQRRYMESLSSYARQFLGQMEKPNVEKIEGLSPAISIDQKSTNRNPRSTVGTVTEIYDYFRLLYARIGVPHCPKCGKEIKKQTVDQMVDQIMELPERTKIQLLAPVVRGRKGEHQKLFEQAKRSGYVRVIVDGSMYELSEEIKLDKNKKHNIEIVVDRLMVKEGIEKRLADSIENVLTLANGLMTVDVIGGEPIQFSESFSCPDCGISIGEIEPRSFSFNNPFGACPTCFGLGYKMEFDEDLMIPDKRLSIAEGAIQVMGWQSCTDPSSFTYAILKALTEEYHFSLETPYCEYPEEIRHVLIYGTDGREVKVHYRGQRGEGVYDVAFEGLIKNVQRKYRETGSEVMKQEYEQFMRITPCETCKGQRLKAESLAVTVADKNIYEMTSMSVKNLNAFLAEMKLGEQQHRIGDQILKEIRARVGFLNEVGLDYLSLSRATGTLSGGEAQRIRLATQIGSGLVGVAYILDEPSIGLHQRDNDKLLGALKNLKDLGNTLIVVEHDEDTMLAADYIVDIGPGAGSHGGEVVACGTAQEIMKNPKSITGAYLSGRIKIPVPDERRKPTGFLTIKGARENNLKNIDVNIPLGIMTCITGVSGSGKSSLTNEILYKRLARDLNRARCIPGEHDEILGMEQLDKVIDIDQSPIGRTPRSNPATYTGVFDMIRDLFAATPDAKAKGYKKGRFSFNVKGGRCEACGGDGILKIEMHFLPDVYVPCEVCEGKRYNRETLEVKYKGKSIYDVLDMTVEEALEFFKNVPSIHRKIQTLYDVGLSYVKLGQPSTELSGGEAQRIKLATELSKRSTGKTIYILDEPTTGLHFADVHKLIEILRRLSDGGNTVVVIEHNLDVIKTADYIIDMGPEGGDGGGTVIAQGTPEEVAQIPESYTGQYVKKYLEKMDHFKLHSKYKPTGDQPQAIEELVRGFREGNQFETLLGVTGSGKTFTMANVIEQLNRPTLIISHNKTLAAQLYGEMKEFFPENAVEYFVSYYDYYQPEAYVPQTDTYIAKDSAINEEIDKLRLSATAALVERRDVIVVASVSCIYGLGSPEDYLGMMVSLRPGMEKDRDEVIRALIDIQYTRNEMDFHRGTFRVRGDVLEIFPANYGDTAIRVEFFGDEIDRITEIDVLTGEIKCRLEHFAVFPASHYVVPQEKILRACDNIEAELEERVKYFKGEDKLLEAQRIAERTNFDIEMLKETGFCSGIENYSRHLAGLPAGATPHTLMDYFKDDYLIIVDESHITIPQIRGMYAGDQSRKSTLVDYGFRLPSAKDNRPLNFEEFEGKIDQMLFVSATPNVYEDEHELLRAEQIIRPTGLLDPEVVVRPVEGQIDDLVGEVNKEIKNHHKVLITTLTKKMAEDLTDYMRELGIRVKYLHSDIDTLERAEIIRDLRLDVFDVLVGINLLREGLDIPEITLVAILDADKEGFLRSETSLIQTIGRAARNSEGHVIMYADTITDSMRVAIEETERRRKIQQEYNEAHGITPTTIQKSVRELISVSKKIAKEEMNFKKSPESMNKAELTKLIADIQKKMEKAAADLNFEAAAEYRDKMIELKGMLRDLMEDFSINEMQKMQRSLQDKYKDRWEPICPETGQNKMLWMVGEIGEVIDIVKKHGAVNALTQEELRKDLVEEMADVLMYYNDVMLCYGITADELKQAYTGKFEKNMKRWMILLPRMLKWMARFSLLSCKKVKISDLQNYFRGGMWYGRFMNKPDMEDMKKTLNRTGLIHIAFSVGSKEKVDELIMKLEEAGYPVDSGPRTTGDDYYESCVVAIEENQVEITVMIFRAEYIQQPYSGEYIEKIYDIKSPWNSTDWTWIKFTEEDDIWCGEFRGKYRGVSCSTTLGIIVVLTSDYMYVLDIYGGEIMEYYSQPEYVDITVTPFGKILVTDGYGIEMFANTKISDMENIVLPINADNLKFVEWRENILKISCFEFLTWGKEIELYLNFETMEWLINKMGLFDKLKPNKNNKDFFEWLDLILKNELNSEIKAINFNLYEDTDNKWSIELVGTFSFDRDNDDWACDEVFATRDNPFMIERESDWKSMETFFIDLLNEYLSFGKYAGSLKKYQAIGIGFVDGDLHILYERMIIKIVTISLMAVFYICYFAKLISQKKQGIKTDQLGKGKEGFVKFIEVALKIITYLLPVIQIISIVFYSETAHIVLQFTGVVITMFGVLAFIVSVTQMKENWRAGVQKEEKTNLVTTGIYSISRNPAFLGFDLMYIGILFSFFNWFLCFATGFAVVFFHLQIVNVEEDFLIEAFGNEYLQYKSKVCRYLGRKRMAKGSVRKKGKKWYYRFYVEDASGNLVQKECVGTESKSETEKLLRQAMDDYEKKKFVAKAENLTVGQLLDVWAEEELKTGTLSNGTVENYLGTIRNIKKHPLAERKLKNVTSEHLQSFFDLLSFGGVHPDGKERKGYSKDYIHSFSAVMQQSFRFAVFPKQYITFNPMQYIKLRYQTDEVDLFSDEDMDGNIQPISREDYERLLAYLKKKNPAAILPIQIAYYAGLRIGEACGLAWQDVNLEEQCLTIRRSIRYDGSKRKYIIGPTKRKKVRIVDFGDTLVEIFRNARKEQLKNRMQYGELYHTNYYKAVKEKNRVYYEYYCLDRTEEVPADYKEISFVCLRPDGCLELPTTLGTVCRKVAKTLEGFEGFHFHQLRHTYTSNLLANGAAPKDVQELLGHSDVSTTMNVYAHSTRDAKRKSVRLLDKVVGNDMKDKELRKLIGSRVKQRRLELNLTQPYVAEKMGVTASTILRYENGSIDNTKKMVLEGLSEALHVSVEWLKGETDEYETDITDKRELQIRDAMGDILEQLPLALTKEEDAFSKDLLLLMLKQYGLFLDSFQFACKNFKGNAGQTDIAKTIGFESNEEYNEIMFLREITPTINALNEMADVVRLYSKKPKTAEQRLANLLSEVLYEDSESVMTQRKIALSIEEAADYTGIGRNTLRQLVEWKKLPVLKVGRKVLIKTDILEMFMEANEGRDLRDRGNVKAVTRTVANMAKSTKSYEERMLEMEKKEQESLEKAKRYAAQKKELLKRKKTEESKKRTHRLCQIGGAVESVLGAPIEEEDIPKLIVFLKRQEANGRFFSKAMQKETNTDMEEVMAIFHYTIKIVGRSKGKSVISASAYLNGDVMKNEETGRISYYTSKKEVVYTRLMMCENAPPEWQIVPEENIKRFQKSVRYKRSEDKEAALKKFKITFQKQRLWNEVLKIEKNADAQLGRSFEFALPKEWSRQEQIQYTTDYIQKTFVDRGMCADWSIHDKGDGNPHVHLLLTMRPFNPDHSWGKKEVKDWDFVRDKNGNIVIDESHPNWWQDKKNPDRHGIRIPVLDENGIQKIGVRNRLQWKRVLTDATGWNNQKNCELWRSEWAKVCNEHLPLHNQVDHRSYEKQGKLQIPTIHEGADARKIEQKFFAGQEIKGSWKVAENQIIKQQNTLLQKILNTFGKVSGALSLWKERLNDIRRKPGNYTLNGIHDWSNRRTAEPNGRNDSGNAEPGHSTLSYAKTESEITKIKQRVIRAAQHFAKYRGTAFQDGRTENEDRAFGKRKSAMAEIGTEAEHRKQFITETEHRIAELEQQIEKGRDIDERIQRIKERRTVGRTSALDRGDTGRTGTERPAYRGTEDAAQRISDLEREIKQREQSIEYSIIKERLEDGRQSIADRERKAAKRKRHDRGLSRMFQTTLFLLAWYSLISTLFQAIQSDVFLSDCKSFFNDLASFIQTFVGWTIDAGHSAAQISTKIPNAFIAGMVYWLLLILIVGICMAGTGMLAILIEIKVIELYKKNCWDVITLLMILTSVAIVIYFGESIKKVLSVNLLLLFVLSQGAYVGIRCYLKVWLEKRPYMNYPFENDTSAVIKKLARKSVRFDKKKNLFCLSAIIVAVAMIMMSLLTVQNIIYQNQKEIEGLHQGIFFDITRDSKEKLLANEEVKSVGLSCNIKTVKENSKELSLIYYDDDMLNLIPAFDGKYPEKANEIAVTDAFFASENKSPEINAIVQLNLDGTLKNYTIVGIYHDKTSTAYPVFVSLEKCRELRGNDLLNGYVWLENADTLIKDEATEILSQISEETGLNNWTVSSYYDYVNTTLSLSNYAVYGAVAAILFLAAALVIYSIFYISVGQKVAEFGQLRTIGASKKQIYKIVLKQGYMLAVPGILIGSIMGTIISYCLQSKGWSVFAFIVSLCGACLFGILLVYISVRKPAKIAANTSPISALKNQVGIVNYRTHKRHRITPVYLAKISFFRNRKKSLLTILSLGLCGVIFFLAASYQSSFNAESMARYWDMKYGDFKISIDLENESENLDALLQKEYFSDYVKRVGDMEGVSNIFTYATLPVDYSTDNDISDSTLLLGYNEKDLASLNAAILSGNITDDTELVVSDPERIYDVYHWKPQIGDTVTFNFKNHSGKTITKAFKIGAITSSNDGMGGYIFRMPENMLKELAGYDCIYAIEIQAEAEYQEIIEQELKLLVSDNRDVRLQTLQDFIVEHQSDNRAGFTLAYAIAAILWIFAVINQINLTVTNLLSQKQEMGTLKSIGMTNKQLEQAFMMEGLFTTLIALLITAVVGIPGGYAIGIFLKNAGMSTGFVFPVVAFTLFAVAMFMLESLMTILLIHSWKKQSVIAIMRNMSILQTIDLKKYYGTEPNITRALNGVNFTVEQGEFVAVVGTSGSGKSTLLHMMGGLDTPTSGSVIVRGEELAKKNDDELTIFRRRNIGFIFQNYNLVPILNVYENIVLPVELDGDTVDQKFMDEVVYMLALEDKLENMPNNLSGGQQQRVAIARALITKPAIILADEPTGNLDSKTSADVLGLLKRTSGEFNQTIVMITHNNEIAQLADRIVRIEDGKIVGMNLNNLSAKKICRLVSAGMVFSMLVITGIFGGIMQDIRIFIVGGTLTLCAFFWIWLLVLIFGKRLSHFTSNLCRTLDNMIDGNEELQKSNDSETLFARINHRLIRLYEIMQKNRHKVDMERQELQMLISDISHQVKTPVSNLQMVTDTLLTKPVSEEERMDFLQGIRSQTDKLDFLFQALVKTSRLETGAIRLEKKDSSLFHTLAQAMSSIVYAAEKKEIAVSVDCPENLIISHDSKWTSEALFNLLDNAVKYTPSGGKISVSVVQWEMYVEVKVTDTGKGISESNQAAIFRRFYREEEVHDQQGVGIGLYLAREIVTRQGGYIKVVSELGQGSEFSIMLPVRMKHILIVEDDNLLNKTLTYNLELDGYTITSVLNARTAAESLKTNIFDLVLLDINLPDGNGYDLCRLIKPEHPDTVVIFLTANDQESNQIRGYEAGAVDYITKPFSISALQRKIKAMFAMLEHHKPAKDIYEDGSLFLDFSEQSASLNGKPLALSAMEYKMLNLFLKNPKQVLTRQQFLEKLWDVDEKYVDEHTLTTSISRIRSKIEADGDTYIKTVYGMGYQWTGGEKKMSENCYKDKYIFHFTAFFCVLQFYKRKDSSVKLLSFLLSMRTIYAEYNINHDSIDVYTSAGYMLRIDCWEAEKNLKTTYGSECALTSLAVDEPLEYARLYLDGNLQMWVDAEDSLELYMKKLIALVLAVVCVLGLVGCNNKTVNIDLPFEVGDVENIEMYHFVGAPVSAEKKVIVAEETIKNLYDMFEGLSLELKEVEETAGAEITSFRFNLSDGTSYELIYGCDGVKTGNLKSSTDNFEYFTSADISSYWSNTDLEAVPVEESELPNMSKYIPGNQKHLTLDDRIYIQNELSKGTSFKDIARFLCKDPTTISKEVKAHRLSDWYHKGTFYNAKNFCVHRYHCKKTNACGKILLCGIKCTSCPTCNQTCPDFEKERCSRLDKAPYVCNGCDKQISHCTIAHKYTYNARFADRKYRECLKESRSGISMTRQELHQKDRIISPLIEQGQSPYQIITNHPELKLSVRSVYTYLDMGILTARNIDLKRKVKFKPRKVHKTQISDRRVFQNRTYADFQQLELSSFVEMDTVHSASGSSKTLLTFFFTREKLFLAFLMNRNTEGAVRLIFDRLEKRFGTYDFQTLFEYILTDRGSEFGDPESLETGFTGIQRTSIYYCDPMRSGQKGGLEQAHTMLRMILPKKTNFEFLTQWDVNLIVSHINSTPRESLQGRTPYDVALETLGEETLKAFQLRRIAPDEVNLTPKLIRFTRMQMEHSFEKNVSISSCWMFASDSVSLPRLDTSGVCPTSHRQMNHKILFVDLDATLLSDDKTVSEENRAAIQKMLLAGHDIVLSTGRPVESGRAVARELELTQPGCYMIAFNGAVLYDCAADRVLLKRSLPIEVTQELFERAAKAGIYAQTYNNTEIITTRHTAELEYYRKKTGLSYKLSANVLDLLEEEPQKVLMIDLKNTGRLARFREKNLEWEKGKCTSFFSCREYLEYCPLDTSKGTGVSCLTKMLNLPLDCTVAVGDEENDIAMLNAAHIGVAVKNATPEVKAAADYVTEHDNNHNAIAEVIERFILMEKEKKNEFHLPEYYENRELSWLKFDARVLNEAKDKSIPLLERLKFVSITSSNLDEFFMVRVASLKDMVHADYRKRDIAGMTASEQLDRINTATRKLVESQYNTYNRSLVPLMAANGIHIIEKYEELTAEQAAYVDRYFEEDVYPVLTPMAVDASRPFPLIRNKTLNIAALLSSKKDEKHKDAVEFATVQVPGVLPRLVPIPADTSENSGEVEGRTFILLEQIIEKNIDKLFLNYHVLCAHPYRVMRNADLPIDEDEAADLLKEIQKQLKKRQWGEVIRLEVEASVDKKLLRFLKDELKVAEEDIFQISGPIDLTFLMKMYGLSGCDSLRYEPYKPQRVPEIEPGEDIFEAIRGGDILLHHPYETFDPVVDFIRQAASDPDVLAIKQTLYRVSGNSPIIASLAQAAENGKQVSVLVELKARFDEENNIVWAKKLEQAGCHVIYGLVGLKTHSKIALVVRREEDGIRRYVHLGTGNYNDSTAKLYTDCGIFTCNEAIGEDATAVFNMLSGYSEPLSWNELVLAPIWLRTRFMRLIARETKHAREGKPAKIVAKMNSLCDEGIIAALYEASAAGVKIELIVRGICCLKVGIPGISENIHVRSIVGNFLEHSRIFFFLNDGEEELYMGSADWMPRNLDRRVEILFPVLDDTLKEKVKHILDVELADNTKAHVLKPDGEYEKIDRRGKVLVNSQKQFCEEAVAAVPKTDHVYRERVFVPAEPAEMAIHTFAAIYIGSYEVSLKIFELSAKKKIRDIDYVRSRIELGADAYSKGSIGYELVEALCDTLREFAQIMKEYRVDAYEAYASAVLRDVDNELFILDQIRLRTGLTVHVLSNSEHRFISYKSVAMREEFEHFIGRSAAVVDVSGSGLQITVFSKGKVLTTQHLGLGTMRMREQLAKKSRNLAQYELQIEEMVVKEMEVFKAMYLENQEIEYLIVIGDYIAELVCRLEKNHNKNTVSIEKFVQYMEQLGKKSLEEIAEELGLSNENDPLIVPYIIICKCMARGLGAKELWAPGVIVSDGIACDYAQKNRIYKPAHDFDQDIISAAESLSRRYMSYSPHIEALSQMAMLLFDTMKKQHGLGKRERLLLQVAAILHDCGKYISFANAPQCAYDIIMSSEIMGLSHLEREIVAGTVLYNSYPLADYEDVADRLDQQSFLTVAKLSAILRVSNAMDRSHKQKFKNVKAQLRDKELIITIETDEDIALEKALFASKTAYFERIFSIKPVVKEKRVYSMKTTKNLILYRDFENEQLFYDFTWVMENYQNEYYNKEDVEGLFYECLKKLMELAVSHGFSGNLWHNFLAFLLVNNENAYSRACEIRGEIKGSINEVARHDFAIMKELFDFDLSVLGNYFSVDCMDALLHYEETADAGKLFNKRIRDRIAELCRHLEAAADAEEFKQAVTAFYGEFGVGKLGLHKAFRIRHTDDGAQIIPITNIAHVKLDDLVGYELAKQKLVDNTEAFVSGKEANNCLLYGDAGTGKSTSIKAIANQYYDRGLRLIEVYKHQFCDLNDVIEQIKNRNYKFIIYMDDLSFEEFEIEYKYLKAVIEGGLEKKPDNVLIYATSNRRHLIREKFSDKEEVREDMHTSDTVQEKLSLYARFGVTIYYGAPDKKEFQKIVTTLADKYGVRMVQEELLLEANKWELAHGGLSGRTAQQFINYLLGKQMKNLLELRDEIDVIDKQIVALYQQRMQIAAEVAEYKIETGKKVFDKDREMEKLATLSALGDSAFNRHGIRELFEQIMSISRKRQYQLMTEHGIYEKPDFEELDALDYKNARIVFQGTEGAYTQLALKQYFGEDAGNSYHVETWRDAMEAIASGDADYAVLPIENSSAGIVSENYDLMVEYGHCIVGEQIIKIEHALLGVPGAKLSDITDVYSHPQALMQCARYLEGHREWEKHSLKNTAMAAQKVRKDGMRHKAAIASRLTAEIYGLDVLEEGIQDNKQNATRFIIVMGKHVFTRKANKISICFEGAHETGSLYHMLSHLIYNGINMDHIESRPLPERNWEYRFFVDFEGNLNDPAVQNALLGLSEETTRLQILGNYEAMKKKISIIIAVIVIIALIAAAAIFHYLSNRTHFNEGYVNGNTAGNLYNGGLFCEYDGTVYFSNPSDGGKLYSMSPDGSNLAKLCDDTVSYINADEHYLYYVRNNPGATGAALSFLSVNTDSLCRIDREGGDDSVLILDSAPCLYASLYGNYIYYIRYDESEGSTLYKVKIDGSGCKQVDTAPDFTCSANGEYMYYNGTDSDHYIWRLNTTDDSKGMLYGGNCYMPTVIDDTTAYFMDCDSNYAIARTDLATGEKTLLSEDRVDWYNLYGDYIYFQKNDSEHPCLGFMRTDGSGYTTLFEGNFKDITITSEYVYFRDFSTDQSYCVPLGSSASPVAFDPGVVEDMRTQSVECSKLGKTRIITDASCGMVRNTGFCGQNLSPHVYLELLSIYFLMSESASALFSXXXXXXXXXXXXXXXXXXXXXXXXXXXXXXXXXXXXXXXXXXXXXXXXXXXXXXXXXXXXXXXXXXXXMLIATIPFHYARFRRNSFVSVRMWDRFFDLDNVVWRTIDKIGKIFLLNLLWLICSLPVFTIGASTTALIYTSMKLSDNEGYWHQNFFSSFKENFKQATALFFIYLAAGAFLAGDFLLGGRAGNSFGQLMQGVAAILFVPYFLSLLYVFGVQAKFVNPVKATIRYSFFVAMRNMKTTIQLAILMILFVWVNTTTLLANFLTLIYGIGLMGYFFGMYYKHTFAKYIEAVEEGSADEEQESMQLGIRLHDIKKAPLEERLAIAHEQGFACGHLALAKVISEYPVDDGALTPGYAMYLKKIFAENQLDVAVLGCYLNLANPNPASLAKNTHRYLAHIRFASLLGAGVVGTETGAVNEEYRFEERNHSEEALKIFINNLCPVVSYAEKMGVIVAIEPVYKHIVCNPKRARKVLDAIGSPNLQIIFDPVNLLDICNYKDRDAIIAEAIDVLGEDIAMVHIKDFKVENNSLVSVAAGTGEMNYDRIIRFMKERKPYIHATLENTVPENAVASREYIQRLWEECHVGMEIRLVMKTARSVSLELDDGGIYKTKEVYRILVNGDEVKTTDTVITSLYGLKPDTDYEIGVEDARGTRQGEIAFRTDYEFVTLDVRKFGAKGDGVSDDTTFIQAAIMACPPESRVLIPAGTYKITSLFLKSGINVELVKGAELLADTDRSHYAILPGLIESYDETGDYNLGTWEGNPLPMFAGIISGIDVSDVTLYGEGSINGAANHENWWKNEKVMVGAFRPRMLSLNRCRNIRVQGLYFHDSPAWVIHPYFSDELLFCNLIVENPAKSPNTDGLDPESCRDVTICGVRFSLGDDCIAVKSGKIYMGRRYKTPSSNIHVYQCLMEHGHGAVTVGSEMAGGVNNLIVEKCRFYHTDRGLRIKTRRGRGKDAILDNIIFRDLMMEQVMTPFTANAFYFCDPDGRTEFVQSREPYPVDDGTPSMKRFCFENITAKDCHVAASYFDGLPEQKIEQITMRNVSVSFAGQAKCDVPIMSNGVEACCKKGLYARNVKKLVLDNVSIEGCEGEEIELHNVDEVERMAAESKTKHYVNVFLRYFVLILVGLIMIYPLVWMVGATFKSNAEIFSSIGFIPKNPTLEGYKKAMESYGGAINVWKAMLNTFSYVIPKVVFTMISATVTAYGFGRFEFKGRGILFSVLMATLFLPQVVLNVPQFIMFSKMGWVDSKLYLPIIVPTLFATDTLFVFQLIQFLRNVPKELDEAAKIDGCNAVQTLVKVIVPMLSPAITSIALFQFMWSSNDFMGPLLYVNTPAKYPLAIFVKMSMDADSGFQWNRILALSLISIIPSLVVFFMAQDKFVDGISAGGVKGMAKKSNTANVAVPKKKKTFVDICKENIGFFFILPWLFGFLVFKLWPMGSSLFYSFTDYNLFKGMNVIGTLQNYVNVFTTKKITTALTVTFKYAFITVPLKLIFALFIAYILNFKIKGVNFFRTAYYVPSILGGSVAIAVLWKAVFRDDGLLNGFLGLLGITGPSWLSDTKYSLFVICLLRVWQFGSAMIIFLAALKGVPQDLYEAASIDGAGKWRQFFSVTVPIITPVIFYNLVTQLCQAFQEFNGPYIITQGGPRNSTTLISLLIYNSAFKQYDMGMASAMAWVMFVILMIFTTIAFLSQKYWVFYSDEEGMDFDQFVSEYIAEDHDVEQLSVMVLEGCRAWYPLAAEAEKQKLQEVMEKAARAAADAHRFGRYVFFLYDQTGEEQYRTWIERNAEWLKNSPQSENGVFGCVEDSSRKISGSVMFSVYPFYMEYETRYHNKAEYAQIVRQLLALAPSEQADMEQKGWYLMAVIDVIDSMSREIFEHYKSLEEIFKKTIRNILAAGWNNDFSKKESAMMGYSIIKACNLGVLNSEKYAEIGLSMIDGLIKEPFDSKDSERMGIAMMAYAQRLILSREMKKDFLKRTMATGLVAAMALSTAACGSSTSEETNTDAAATTPETPATEAAAATEAAATDDGSYENCTLTMSWWGGDTRHEATLKAIEAFEAAYPGITVEPTYAAWDGWEAKMATAFAAGTAQDVNQINWNWITQYDNDGTAFLNLNDYSNVIDFSQIDSSYLDMCTASDGSQAGIPISMTGRIFYWDKTTFDEIGCEIPTTLEELKACGEKFAAYGDDYYPLALGEYDRMILMVYYLESVYGTDWVTDGQINYTTDQIAEGLQFIQDLEDAHVIPSVATIAGDGAASLDQNQNWIDGHYAGIFEWDSSASKFASAAEGREIVVGDYLTDLGEYQGGYAKVSMCWAISATCEHPKEAALLVNFLMNNEEAAKILGSERGVPVSQIALKTANDAGLLNGQVVEANGKVLAWVSNSLDPKFEDSQLKSSDGVYYDVMAGLSYGDYTVEEAAQTLYDGVTAVISQMGILDNFSLEGKVALVTGASYGIGFAIATAFAEAGATIVFNDIRQELVDKGLASYEEKGIKAHGYVCDVTNEEQVEAMVAQIEKEVGTIDILVNNAGIIKRIPMLEMKASEFRQVIDVDLNAPFIVSKAVIPGMIKKGHGKIINICSMMSELGRETVSAYAAAKGGLKMLTRNIASEYGEHNIQCNGIGPGYIATPQTAPLREIQPDGSRHPFDQFIIAKTPAARWGTAEDLQGTAVFLASDASNFVNGHVVYVDGGILAYIGKQPQMKDFIKINENDNVIVALKELTAGETILAGTKEVTARETIPAGHKMAIRDIAAGAEVIKYGFRIGNAKENIAAGQWVHVHNLKTALGDLLEYTYEPVETNVKKTEDVKFMGFARANGKVGVRNEVWIIPTVGCVNNIATAMAKAANARVKGSVEKVIAFPHPYGCSQMGDDQEHTRTILADLVNHPNAGGVLVLGLGCENSNIGELKKYIGDYDENRVKFLVCQECEDEMEEGAKLLNELIDYASVFEREPISASKLIVGMKCGGSDGFSGITANPLVGRFSDLLIGKGGTTILTEVPEMFGAETLLMNRCANRELFDETVSLINDFKQYFKDNHQTIYENPSPGNKKGGISTLEDKSLGCTQKSGSAPVCGVLSYGECVKTSGLNLLSAPGNDLVAATALAASGAHIVLFTTGRGTPFASPVPTVKISSNSTLAGKKKNWIDFNAGVLVEDAELDTVGQQLFDYVIDVASGRKVCSEEAGFHDMAIFKQGVTLMDLLSREKTGKVERPVRVLQFGEGNFLRAFVDYMIDIANEQGRFNGDIVLVKPIEFGSLDRFHEQECQYTVQLRGIVDGEPKRINRIVTSVADAVDAYGEYEKYAAFAKLDTLRYIVSNTTEAGIVYDDTDRLEMNPPKSYPGKLTKFLYERYKHFNGAADKGLVMLPVELIDDNGIHLKECVLKLAKLWNLEEGFTVWLNDACVFTSTLVDRIVTGYPRDEAEELCKEFGYQDNLIVTGEPFALWVIESAKDISKEFPLPDAGLPVIFTDNQKPYKQRKVRILNGAHTSFVLASYLCGNDIVLESMQDELIFNFMKATIFDEVIPTLTLPKQDLIDFAEAVITRFNNPYVKHALLSISLNSVSKWRARCMPSFLGYIEKEGKLPVHLTFSLAALMAFYTGTEIRDKALIGHRDGQEYNILDDAAVLEFFAANSSKGAREYAHAVLSNEAFWGQDLSALAGVEDAVASYTEEIRALGMRKAMEKIFAMLPRALHVKLHNIRYKTSIAVKAVSLQPHLLYNIEIEKATTEAGKNNKNAKRMKKKMTIYDISKKAGVSIATVSRVLNGSDKVRPATRKKVMDIIEKYDYTPNAFARGMGLHSVQTIGILCADSSDLFLAKAVYYLEQELQSNGYESLLCCTGYNLDIKKNYLNLILSKKVDGIILVGSNFIGTNEEENQYIKDVSAQVPIMLLNASFDYPNVYSTLCDDYTSMFEATVSMLDAGIEDILYLYNSNSYSGVKKLGGFRAAMEAHSVPDYEKRILFYEGDPQQMDDVANYLERLSKKKLSFHGVIASEDPLAIGAMKYARRQGLCVPEDLSVIGYNNSMLTTCCTPELTSVDNRLETQTHQLVQTLLGVLQGEEMPKKSIFSGKLIKRGTTLFMKTFMDKDFLLQTETAKKLYNDYAAATPILDYHCHINPQEIYEDRQFENITQVWLGGDHYKWRFMRSCGVDERFITGDASDKEKFLKWAEVLGKAIGNPLFHWSHLELQKYFGYHGVLNKNTAEEVWELCNKRLAEPDMTVRNIIKQSNVTLICTTDDPIDSLEWHKKIAEDASFDVKVLPAWRPDKAMNIEKPTYPEYLDQLSAVSGIKVATFADLCKALSNRMDFFASMGCCVSDHALEYVMYAPASAEEIESIFAKRLAGNDVTKEEELKFKTAFMVNVGKEYAKRNWVMQLHYGCKRDNNTPMFNKLGPDTGYDCINNYAPSSEMADFLNALNQSDELPKTIIYSLNPNDNQAIGTILGCFQDSTAVAKIQQGSAWWFNDHKTGMQDQMISLANLGNLSGFVGMLTDSRSFLSYTRHDYFRRILCNLIGNWVENGEFPADYETLEEIVKGICYNNAVNYFGFDLKTCMELRTAASPRDVKHYTTERLREEFLIDDLFLPDVIKLVYSHIDRIITGSAVPVKETLKLTAGDELRAQYFCERRELGVINIGGAGTITIDGKAYHVAHKEGMYIGMGSRDITFASDDAAAPAKFYLNSAPAHRTCPTVLIKPEGTPEDGVVIVKDCNKVELGSLETANHRTICKYILPGQVESCQLEMGMTKLEPGSVWNTMPCHTHDRRMEVYLYFDMPEDALVMHYMGEPTETRHIVMRNEQAVISPSWSIHSGCGTQAYTFIWGMVGENQDFDDMDDVAMTDLLMKIALINENSQAAKNEMICNTLKSVVEPMGHTVFNYGMYSAEDEHPLTYVQNGILAAVLLNSGAADFVITGCGTGEGAMLACNSFPQVLCGHVESPLDAYLFSQVNDGNCIALPFAENFGWGGELNLTYIFEKLFCAPGGGGYPKERVVPEQRNKKILDEVKKVTHRDLVSILKELDRDLVVGALSGEHFAEYFYANCKDDAIAACVKELLAMWKWRWKFGSKNVEFLTNRMFASSMIRVFPSLEHSTDCVRKPADNFRTFVCVPCGTRQQMAMHNIELYLLSDEELVWEQTACLERLYDFNQTRPGEMEKRTAMLKEMFASNSVSLPRLDTHGVCPTSRRQMKRMMGFALFCFSMGMLVMLVLHSRFFGFLLLVLCMIAGYYLFCCDDMADNSFHTTVESLFKGMDSFITTKTVVGDAIHIGDTIILPLVDVSFGVAAGAFSQDKKNNGAGGMGGKIMPSAVLVIQNGTTKLVNIKNQDGVTKILDMVPDFVNKFTSRNQVTSDTASAADEDETKAREAAGKEMEDILKDSVNKEENMAVLLLILKIIGIILLILLGLILLILAVVLFVPVRYQVSGSIGEKTTVRIAVTWLLHAVSWRAAYEEEGFSSQLWIFGITRKGKKPDDGEPGEDDREDGAEEPEERSAADVPLTDGEQKTGSILADSEQGEAERFDERQAKKVCAGAKKPDPAEHKELEQANPAVRRKQRGGLFRRIWERIRAFFAGLVRKLRQFRAGIKEALKKIKDVRTFLTDERHREVLPLIFTELKYLLTHFKFRRIRTDLTFSMGDPALTGQVLGGLCVLPFLYRYQVQVYPDFEAENTYVTGTFDIKGRARGLHIAVSAVRLLGKKEFRIWLKWLMHRMTWYDELYVGESIVHKTKRVKWKIDHNAGQIGIYVIAPASNDKNLLDIIPAAELLQKGYPKKDLKIAGLAGSYDEALEVAVSIVDEVYRNTGAFFVRSYLDEHRSGREGMIEATSCGGVVIFRGKILLLYKNYKNKYEGWVLPKGTVEAGEEYPDTATREVLEETGVKAAIIKYVGKSQYSFTVPEDTVEKDVHWYLMMADSYYSKPQREEYFVDSGYYKYHEAYHLLKFPNEKQILEKAYNEYLELKKSNLWGNHKYFMWKLFHKNGKKKKNTKNREFAVVTYSFLGLFLCLMGYFVYFEQVESEQFINNPYNKRQELFTRSVVRGSIYSADGVTLAETVTDAEGNETRKYPAGRIFAHVVGYSTHGTSGIEAMANFNLLRSNILYMEKAVSEIKGEKNPGDSVTTTLNYDLQLQAYDALGSYDGAVVVMEPETGRILAMVSKPDFDPNTIADDWDTFVSDDSDSSVLLNRATQGLYPPGSTFKIFTTLEYIHENADYADYHFDCSGEYTVGTKTIHCHNNKRHGSEDLKTSFANSCNSSYASLGLTLDLEQFDDLCDQMLFNTALPTDFESSKSSFVLEPGDSDSAVMETSIGQGKTLVTPFHMALIASAIANDGVLMKPYVIDRITDAEGEVVEQYEPAEYKTLLSESDASVLQEYMRYVVEEGTATKLKSDSYEAAGKTGSAEFSSSSDATHSWFVGYAHNGEEPDIAVAVIVENSGVGSEYAVPIAKQIFDAYYTWENMTDLIVELSKYLMTLLFAFYTYECFSSFRGKLTPEKRAKIFKRQMCLMYLIHLDAFLAIYAVTDDIRMILFYVVQAAFIAVTISSYRLVYGRASGLLINNMCMLLMIGFIMITRLSFDKAIRQFAIAVGAMVCSLIIPVLIQKVRFLRKMPWLYAAAGIIGLLAVLAFGITSSGAKISISLAGISVQPSEFVKIIFVFFVACMLYENTDLKHVCIATVLAAVHVLILVLSRDLGGALIFFVTYLVMLYVATRKLFYFAGGLLTGCIAAVVAYQLFSHVRVRVLAWQDPLSRIENEGYQICQSLFAIGTGGWFGMGLYQGMPEKIPVVEQDFIFSAIAEEMGGIFAICLLMVCISCFLMFFNVAMQMKEQFYKLIALGLGTVYGFQVFLTVGGVTKFIPSTGVTLPLVSYGGSSLFSTMIMFAVVQGLYIRRQDEGAANERKNAAPPRRRKTGFDEDVETFSMMQKRELELLAPAGSYETFEAVIRAGADAVYLGGSHFGARAYANNFNEEELLRAIDYAHIHGRQVYLTVNTLFKEEELEQGLYEYLLPYYEQGLDAVIVQDMGAFARIRSMFPRMDIHTSTQMTVTGAAGAAYMKQLGASRVVMAREMSFAEIREIHDKVGIEIESFVHGALCYCYSGQCLLSSMLGGRSGNRGRCAQPCRLPYEVYKKDQKSRIACGNYVLSPKDLCTIDAIPALAESGIFSFKIEGRMKQAEYAAGVVSVYRQYMDRYLDRLNEERAGGCSEDEARRRAKKAYAVTEEDHRKLLALGNRSGFTDGYYFRRNGREMITFDSPGHAKTDEALQKTVREHYIKVRPEQEIKEKINGFLRLKKDLSATLKLQCEGCEITCEGEQVLQAQKQPLSRDRVDVCMRKTGNTPFAFEQLAIEMDEDVFLPVQALNALRREALLALEEKLLQGYRRDGAASPEAEKLGCGADKRTRQEERREAEDAGKTVIVSLENRCLLSVVLRSSFVHEIYADSSCYTRDELWMALLKDAGEAHLAGKKFYYILPAVFRSRTAAFYRENIEHLKALPLDGFVAKSYDAAAFVRQELGAETPLILDHSLYSWNSAARDVFLQLAPERDTVPLELNRSELFARDNHHSEAMVYGYLPLMTSAQCVHANTEKCDRERGILYLKDRYGKYFPVKNNCTECYNTIYNTTPLMLFDERADFLRMGIAAYRISFTIEEEEQAAFILDLFERTFLSGKHSVKELFPDGYTRGHYKRGVEMAEKTSAEVIIGGKVYTLSGYEGEEYLQKVATYINNKLGEFQGMEELRHLSGDMKATLLQLNIADDYFKAKTQVEKLEREIEQKEKEIYDLKHDLISNQIKAESDEKARKELEEQNKELLINKAKLEASLEDALLGKVTEKDKTEEMEKRVISTQVQEEDLKIEKSLRPQTLDDYIGQQKAKENLKIYIEAAKARGESLDHVLFYGPPGLGKTTLAGIIANEMGTHMKVTSGPAIGKPGEMAAILSNLQEGDVLFVDEIHRLNRQVEEVLYPAMEDYAIDIMLGKGATARSIRLDLPKFTLVGATTRAGLLSAPLRDRFGVVHHLEFYTVEELKTIILHSALTLGVEIDEEGAYEMARRSRGTPRLANRLLKRVRDFAQVKYDGRISKEVASFALDLLEVDKMGLDQNDRNILMTMIGKFAGGPVGLDTLAAAIGEDAGTIEDVYEPYLVKNGLINRTPKGRVVTELAYQHLGIEHSVMYAYIKGVLADVEEESVVVEAGGIGYRIYTTGQTFDYLPAVGEEVKLYTYLNVREDAMILYGFLTKDDLRVFKLLIGVNGIGPKGALAVLSVMTTDDLRFAVLGDDAKAIAKAPGIGAKTAQRVILELKDKLSLEEAFELKSEHVSRQNENGSSGVKNEAVQALVALGYASSEALKALNGIEITDDMDVETLLKAALKNMAFLMKKTDSTPLRDKVAYLGVFLALALICSYVESLIPFYFGIPGVKLGLTNIVVVLMLYCVGTKEAFAISMLRIVLAGFLFGNLFSILYSLAGGMFSFLVMYLLKRTGKLGVLPVSVAGGMSHNIGQIAVAAFVVENINIFYYLPVLFVAGIVTGLLIGVAAQEIILRIGGRLKRMKKRISRNDVIFLAILLAVVTVFLVVYERTGTRADAGACVRVTVDGSVYGIYALGEEQEIPIVQDGVTTNVLTIRDGRADMTEADCPDKLCVHQKAISKNHEMIVCLPNKVVVEVTGSEENGFDSIARMKKKIDIEIIDKKQIPQSEPERQYYFMDIAKNYVEQLAAKKGSPLTFHVTTFGCQMNARDSEKLVGILERIGYVETDTEDADFVIYNTCTVRENANNKVYGRLGILQNYKKKNPHMLIGLCGCMMQETVVVEKLKESYRFVDLIFGTHNIYKFAELIVTAMESDSMTIDIWKDTDQIVEDLPVERKYSFKSGVNIMFGCNNFCSYCIVPYVRGRERSREPKEIIREIEQLVADGVVEVMLLGQNVNSYGKNLKEPVTFAQLLEEVEKIEGLERIRFMTSHPKDLSDELIEMMGRSKKICKHLHLPLQSGSSRILKIMNRRYDKEHYLELVDKIRAAVPDIALTTDIIVGFPGETEEDFEETMDVVRKVRYDSAFTFIYSKRTGTPAASMEEQVPEDVIKARFDRLLKEVQKISAEKAGALTGQTLPVLIEEQNEQDASLVTGRLSNNSVVHLPGTADMIGKILDVKLTECRGFYYLGERADGKGQTVMELTELCKSAKEVSRQIGNLDTNTKNEVLRAAAEALVAHTDEIIRENEKDLARGRENHMPEGLLDRLMLTPSRMEQMAEGLRKVADLADPIGEVLSMKKRPNGLMIGKKRVPLGVVGMIYEARPNVTVDAFALCFKTGNAVILKGGSDAILSNIVIVSVLQEVLEAHGIPRAAVSLIEDTSRETAAAFMKMNEYVDVLIPRGGAGLIRAVVNQATIPVIETGTGNCHIYVDESADFDMAIRIILNAKTQRIGVCNACESLVIHEKIVDAFMPKLAAALQQKDVSIHADEKSLAAAERREAANGGDLKKELLSAATEEDWGREYLDYMISVKTVSSLDEAIAHINRYNTGHSEAIITENYTNAQRFLDEIDAACVYVNASTRFSDGFEFGFGAEIGISTQKLHARGPMGLDALTSTKYIIYGNGQTRPMEKRQDFPDAALTQEKARQQIRARHKAWRMELPQEEVQEKNRKICERLAASDWYHNSAVIYGYYPLGAEADCLPFLAQALSDGKTVALPVTSKERLQRDCGQVKRMQDTHRMEFYRIRELSRVREGAFHVMEPDESCKRIGEEDAVVLVPGLVFDRKGNRYGYGGGYYDRYFARFPKLSRMAVAFEGQIEEQLAVLPTDVRMHRIYTEEREYRIMNQEQIDRINALYRKSKAEGLTEEEKKEQALLRKQYVADVKKNLAAQLNNIDMVNPDGSVENLGDKYGKKTGLSMEQKHFHFNEKKRVVVKIGSSSLNYGETGNLNFTKLEHLVRELCNLRNRGMDVCLVSSGAIAVGRQTLGMDERPKDISTKQACAAVGQARLMMIYQRLFAEYNQVAGQVLMTKNTMVNPVSRENAKNTFDELFRLGAIPIVNENDTVSTYEMQFGDNDTLSAIVASLIGADLLILLSDIDGLFTDDPHKNPDAKLIEVVEEMDASIYGMAKSSTGSDVGTGGMATKLTAAKIATLSGTDMIIANGRDVCILHHIFDDSFKGTIFQAKKKESFRIEDFILETIGMRKKKVLSCLLVPLLSANLLLSGCSRTADEPVTKSGFYFNTVISVSIYEKGSEELLDDCFALAQKYEGYFSNTIPDSDISKINDAGGAPVTVHDETIELLKTGISYGDLSGGKFDITIGRLSDLWDISTKALLDQTDVSMIPSDTDIQAALATVDYREIQIDGNTVTLQNPDARIDLGGIAKGYIADQMKAYLNQKGITSGYINLGGNVLALGAKTDGSAYTIGIQRPFGEENEAIASVSITDQTVVSSGVYERYFEVDGTRYHHILDTATGYPYDNGLLEVTIITGASVDGDGLSTTCFSLGLEDGMALVESLDATEAIFITDDYEVHTSSGMGTVIPYEILEDMNVTAILFAALIVGGVGILIGFFLGISGEKFKVEVDEKEEAILGVLPGNNCGGCGYAGCSGLAAAIAKGEAPVNQCPVGGAPVAAKIGEIMGVAAEEGERKVAFVKCAGTCEKAGRDYEYTGNEDCAAMAFVPNGGPKSCNYGCLGYGSCVKACPFDAIHIVDGIAQVDKEVCKACGKCVAACPKHLIELVPYKAKHIVQCSSKDKGKDVMKACSVGCIGCHLCEKNCPKDAVHVIDNVAYIDQEKCVGCGICAQKCPKKIILMKTLLLIAIGSAIVNNVVLSQFLGICPFLGVSKKTETAAGMGGAVVFVITISSFVTALIYKYILANSYLMSKGIDLTYLQTIVFILVIAALVQFVEMFLKKSMPALYQSLGVYLPLITTNCAVLGVALTNVTKEYGILESVVNGFATAFGFLIAIVLMAGVREKIEYNDIPKPFQGTAIVLISACLMSIAFMGFSGMIMNKNVERLYNGLIKENPTFVLMLGMCPTLAVTSSAINGLGMGLSTTVVLVLSNMLISAFRKVIPDGVRMPAYIVIVASLVTVVQFIMQAYTPSLSESLGVYIPLIVVNCIILGRAESYASKNPVVPSLFDGLGMGLGFTMGLTLIGLFRELLGAGQIFGFQILSLSWFTPITIFVMAPGAFLVLACLVAVMKIVREKMAAKGKPLAEPSGCITGDCAGCSMSAACTGKKPAAEAPAEKAEMNKKIVHDALVLFAFTVVLGLILGVVYGITKGPIDQVNYEKTQSAYKQVFEDADSFEEYADFDTAAAEDLMAQNGYSDDIEAVNTALDASGNPLGYVLTVTAKDGSQGSITFSVGIQNDGTVNGYSITSISETPGLGMKAQEEPFYSQFEGKNVDSFTVVKSTPSADNEIEAISGSTITSKAMANGVNACLTYFHSVLEGGNMSDLYHVSSSPHVRAKDTTSRIMLYVIIALLPTSLFGIYNFGYKALVLILVTIASCVASEWVFNKIVHKKQTIDDLSAVVTGLLLALNLPATLPWWEAVIGGVFAIVVVKCLFGGLGQNFMNPALGARCFLLIAFAADMTKFGITKNGIEVYSSVTPLAAMRNGEAVNTMDMLIGRTAGTIGETSAIAILIGAIFLILMGVINLRIPASYIITFAVFMLLFGGHGFDGSYLTAQLCGGGLMLGAFFMATDYVTSPITPMGQIIFGICCGILTGLFRCFGANAEGVSFAIILSNILVPLIEKHTVPMAFGQVKEAKKQEGGKMGSKTFKGGVHPYEGKELAKDQPIVEVLPKGDLVYPLSQHIGAPATPVVAVGDKVLKGQKIAEAGGFVSSPIYASASGTVKAIEPHRVAVGDMVNSIVIENDGAFEEVEYTPCEDVTALSKEEIVNKVKEAGVVGMGGAGFPTHVKLSPKEPEKIEYVIANCAECEPYLTADYRRMLENPEELIGGMKIILQLFDHAKGVLGIEDNKPDCIEKLTELVKDEPRIEVCPLQTKYPQGGERQLIYAVTGRAINSKMLPADAGCIVDNVETIIAVYRAVKLGRPVTNRISTITGDAIANPGNFLYSIGTSYAELVEAAGGFKTQPEKIISGGPMMGFAMFSLDIPTTKTSSSLLCLSKDEVSKVEPSACINCGRCVEACPEQLIPSRLAKFSNNGLAEAFESWHGLECVECGSCSFVCPARRQLAQSIKTMKKQVLAAKRKKMYFFTNLLTKNSQYFFPIYVIMYVKAKVSMEQKHTLMLACSGWFCSMMITWHEELTFDFSDPVSNEVFTENCIFFDIETTGFSPARTDLYLIGCATRRGSLLCIDQFFSENAADQENVLSAFLDLLSGYDTILTFNGIGFDIPYLKAKCKTLHLSDPFDAHSYIDLYKEVSRFKFLFALTSYKQKSIELFLGIDRIDAYSGGELIEVYKEYVRHPAKDSLALLKQHNYEDVLYMPKLLPVLSYPKLWEKAFSLQSLQASEYRSMDGVSGNKELFFTLALQYPVPKPVSFSYDDCYLSMSGSTARLRVRLFEGELRFFYSGSPKDYYYLPEEDIAVHKSIASAVDKEHRVQANASNCYGKKYAIFLPQYDAMFSPVFREQPRGRKCYFELSADFAADPAMQMDYVLHLLETMRSHRKMLETDNYEKFKKDILALAKIDLNSYKEKQMRRRINTLITKNHIATYDEYVALIKKDKEKFEQFINFLTINVSEFYRNPDQWKILENEVFPKLIQKFGKNLKIWSAACSTGDEPYSLVMALSRHLPLANIKVIATDIDKQVIDTARMGLYNEKSIASVPDDLKKKYFTKVGNSYQISDEIKKRVEFKEHDLLKDPYPGGCNLIVCRNVVIYFTEEAKDEIYAKFYKALATGGVLFIGSTEQIMNYREIGFERDKSFFFEKAMSEMSFEQMLEESFKTIRNGEVVEGTVIDVKPDEIVLNIGYKADGIITRNEYTNEANVDLTTLVSVGDTMEAKVLKVNDGEGQVLLTYKRLAAEKGSKRLEEAFENKEVLTAKVAQVLDGGLCVNVDETRVFIPASLVSDTYEKDLSKYKDQEIEFVISEFNPKRRRIIGDRKQLLVAKKLEQQKELFARIKIGDVLEGTVKNVTDFGAFIDLGGADGLLHISEMSWGRVESPKKVFKVGDQVRVFIKDINENKIALSMKFPAENPWNGAAEKFAIGNVVKGKVARMTDFGAFVELAPGVDALLHVSQISKEHVEKPSDVLKVGQEIEAKIVDFNEEEKKISLSMKALLAPEEDADADVADVDIDAVAKEEEMNVILAKSAGFCFGVKRAVDTVYERILEKEPLYTFGPIIHNEEVVRDLEKKGVVVVNDMDELAGKPQGTVIIRAHGVERGVCEKIQTLGFSIVDATCPFVLKIHRLVERYSGEDCHIVIVGNASHPEVKGIKSWSNAEDTRVIGTREEAEKYDASHGKKVCIVSQTTFNYNKFQELVEIIKEKGYDIIVLNTICNATEERQTEAQAIAEQVDAMIVIGGRNSSNTQKLFEICKNECKNTYYIQTVKDLDLAEVRSVDNVGITAGASTPNNIIEEVQKNVRNELMSMNIAIDGPAGAGKSTIAKKLAKKLAFVYVDTGAMYRAMAYYFLQNGIAPDDEQAIAAACPKVDVTIVYENGEQQVLLNGENVNGVIRTEKVGNMASATSVYPVVRKKLVELQRQLATKTDVIMDGRDIGTCVLPEAQVKIYLTASVATRAKRRYDELTAKGTQCNLEEIEKDIEDRDYRDMHRETSPLKQAKDAVLVDSSEMNIDEVVDAIYQIYARVMSKVIVVGGGPAGMFAAIAAAERGHEVVLLEKNEKLGKKLYITGKGRCNITNAGDMDTLFANVMTNPKFLYSAFYDYDNQRVIDFFEENGLATKVERGNRVFPVSDHSSDVIATLQRVLKRTGVMVQLHAEVRQILTGEGAVRGVKLADGSVLEAERVILATGGFSYQTTGSTGDGYRFARELGHTVTQITPSLVPFYVKETCAARMQGLALKNVQVRIRDGKKLLYDEFGEMLFTHFGVSGPLILSASAAIKPGRVEKELAMEIDLKPALTEEQLDARLLREFEEAKNKQFKNAVVHLFPAKMIPVMLEAGAIDPEKKVNEITREERMGFVHLIKAFPLTLCGLRDFNEAIITRGGVSVKEVNPSTMESKLVPGLYFCGELLDLDAMTGGFNLQIAWSTGHLAGESIEMSNTNDLSNRINDAYSKLSKGQKRLATYITDNYDKAVFLTAAKLGEVVGVSESTVVRFATHLGYKGYPEFQSALEELVRNKLNSIQRMEVTYGRISQSKILETVLKSDADKIHSTLEKIDQNAFELAVDTILHAKHIYIIGIRSCAPLASFMAFYFTLMFPNVHLIQTSSSSEIFEQMVRIGKEDVIIGISFPRYSMRTLKAMEFANNRSAKVITLTDSVHSPMNLYSSCNLIADSDMASIVDSLVAPLSVINALIVALCMKKQNEVAKTLEMLEDIWDEYQVYENDEINYIDDSIKMRYGKVGDAELYEMRDITPATNFIHTLMQSPPDASAWIAGGNNFPSISGLARFYATEYEGTLVEVEVFGLPNVAAPGSSNFYGMHIHENGVCVSPFTSAGAHYSRTPAEHPNHSGDMPPLLGNQGYAWMAFYDKRFTIPEIIGKSLIIHRMPDNFTTQPAGDSGERIACGVIKMSEVVKKPLKITETVLRDAHQSLIATRMTTEQMLPIVDKMDKVGYNAVECWGGATFDACLRFLKEDPWDRLRKLRDGFKNTKLQMLFRGQNILGYRPYADDVVEYFVQKSIANGIDIIRIFDCLNDVRNLQTAVTACNKEKGHAQVALSYTLGDAYTLDYWMEMAKKVEDMGADSLCIKDMAGLLVPTKATELIQALKSATNLPIELHTHYTSGVASMTYMKAVEAGCDIIDTAMSPFSMGTSQPATEVMVEAFKGTEFDTGLDQNLLAEIADYFRPMREEALESGLMNPKVLGVNIKTLLYQVPGGMLSNLLSQLKEQGKEDKFEEVLAEVPRVRKDLGEPPLVTPSSQIVGTQAVFNVLMGERYKVATKETKDVLLGKYGQTVKPFNPEIVDKVLGEEKKNAITCRPADLLEPELDKIEAEMKQWKQQDEDVLSYALFPQVATEFFKYREAQQKKVDASVADTKNGAYPVMSYFSETMGNLLHQTAFFNLTWGNFVMIIVACFFLYLAIAKGFEPLLLVPIAFGMLLVNIYPDIFADPEQMSNGVGGLFHYFYVLDEWSILPSLIFLGVGAMTDFGPLIANPISFLLGAAAQFGIFGAYFLAIMMGFNDKAAAAVSIIGGADGPTSIFLAGKLGQSGLMGPIAVAAYSYMALVPIIQPPIMKLFTTKKERAIKMENLRPVSKLEKILFPIVVTVVVCTILPTTAPLVGMLMLGNLFRESGVVRQLTDTASNALMYIVVILLGTSVGASTSAEAFLNTTTLKIVALGLIAFMFGTAAGVLFGKLLCFLTKGKINPLIGSAGVSAVPMAARVSQKVGAEEDPTNFLLMHAMGPNVAGVIGTAVAAGVFMAIFGIMKSYTITVNGNVYDVTVEENGAVSAPAAAPRRAAAPAAAPAAKPAAAAGAGSVKIEAGAAGKVFKLEKSVGDAVKKGDSIMVLEIMKMETPVVATQDGTVASINVSVGDMVEAGALLATLNMKKKLSLILCLCFMALGLAACGTDPTTVDYFGMTYDELQSSMEQEVSALVGLTDDNRTYIQSYGSDTAMKLVESWDEATSDVGAYQGLGEFNITKAQKTLTVDQYVEYQNREVIVSYIYTYNYETEQPELTDASADKVYTLGEKMEKAALNTLMGMGTVFVVLILISLIIYCFRFISVIQNKAAGKGKKNEAEAGAVVEQIGQREEQLTDDLELVAVISAAVAASTGASADSFVVRSIRRRMNSSNDSLAMQRITRLVDENSFIEIGSLVTARSTDFNLAATDTPSDGVITGHGLIDGNLVFIYSQDASVLNGTIGEMHAKKIAAVYDMAMKMGAPVIGFIDCAGVRLQESVDALDGFGLIYAKEVAASGVVPQISAVFGSCGGGLAVVPALSDFAFIEESKGKMFVNSPNAIDGNRIEKCDTSSAAFQADENGCIDATGTEDEILADIRELVGMLPLNNEGDVYTDECADDLNRACESMDAMKGDPRYLLSEISDSHTFFETKAGYARDMVTGFIKLNGMTVGAVANCTTVYDEEGKESEKFDNVLSAKGCEKAAEFVSFCDAFEIPVLTLTNVKGYKACKCSEKRLAKALAHLTSAFAGATCPKVNLITGEAYGTAYVAMNSKSIGADFVYAWPDAKVGMMDADLAVKIMYADASADELAEKAKEYDALQGSVMTAARRGYVDLIVDPADTRKYLVDAFELLYTKCAYTPDKKHGTKMYRRFLSLLLSMSLLIFSPVRVRAQDVPAESELYAKSAVLMDADSGRILYEKNGHEAMANASTTKILTCIVALENCDPASVVTVSKNAASQPKVHLGMHEGQQFYLRDLLYGLMLESYNDCAVAIAEFAAGEVQGFAALMNAKAEELGCEDSYFITPNGLDAKDDAGFHHTTAADLAKIMKYCIKESLKSDEFLEITRTAQYSFSDAEGKCTYQCTNHNAFLQMMEGALSGKTGFTGTAGYCYVGALQREDKTLIVALLACGWPNNKTYKWSDTRKLMNYGLEQFKKIDLLQIEPDEAELAPIEVRDGQGGKIGETVYLKLVVRNYAGEESILAPLSSEVTLRYEIADRLYAPVKSGDYIGKIRYMLGEETLAERCVVAGETIGKIDYPWCLGQVLRLLWIEMGISCGNADGIFVGEKCEHFFRLNVCIGFRVSSTFGQSDGCMSGTPETMGGLSGVPKGTSSQTIMNEKNYEAIIEAILFTMGESVELDKIAAAIELDKKETKAIIEKMMKHYENPSIGVKIIELDDAYQMCTKSEMYEYLIKIARQPKRHVLTDVLLETLSIIAYKQPITKVEIEKIRGVSCDHAVNKLVEYNLVCELGRLDAPGRPLLFGTTEEFLRSFGVQSIDELPVLNPVQVEEFKQEAEAEMHMKLDIMEMTVKLQVFEGPLDLLLHLLEKNKVNIYDIPIVEITNQYMEYIAEMKRQDLNVVSEFLVMAATLIDIKSRMLLPAPETEDEEEEDPRAELVQQLLEYKMYKCMAYELRDRQMDAERVLFKEPTIPPEVAEYEEPVNMEELVSDVTLARLNEIFKSIMKKQVDKIDPIRSKFGKIEKEEVSLSDKMAYLENYCLTHSRFSFRSLLEAQAGKMEIIVTFLAILELMKTGKIFISQEHTFDDILIQSKIVAMKQFLSFLLCCTLTLSSPVLAAENSEADLSVSAPSVLLMEASTGTVVYEKNAHEIRHPASITKIMTLILIFDAIERGQISLTDTVTVSEYAASMGGSQVFLEPGETQTVETMIKCISVASANDACVAMAEYLCGSESEFVRQMNERARGLGMKDTTFVNCCGLDTEGHMTSAYDVALMSRELTVNHPEIHNYCTIWMENITHVTAKGSSEFGLTNTNKLIRQYEYATGLKTGSTSLAKYCVSATAEKDGLELIAVVMAAPDYKVRFADATTLLNYGFGKCRLYTNENTDALPDLPVTKGTETAVGLAYDSPFSYLSVKGEDLSDVKKEQILPETVTAPVRKGGVAGRVVYSAGGRELGSVNIRYTADVHAASYRDYFKMALFYLLTMKKIAHLLMGRLTIVGVSILLQICWLFLVLWKFSYQFTYANLIIRAAAIVLVLVIANKWENPANKLSWTFLILLSPILGIMLYFLFGRSGLTKHTREQMDAVNRKVDACMPVDEEAVRLLQEADPSVLRQSKYIADWGHFPVYRNTATKYYESGEAMFPDMLAALESAEHFIFLEYFIIEEGHMFHQIEDILEKKVKEGVEVRLIYDDVGCIGTLPPRYYKQLQKKGIKCAAFNPFRPLLSVIMNNRDHRKIFVVDGAVGFTGGINLADEYINEVKRFGYWKDTGVRIEGEAVWSLTSMFLSMWNYIVHSTEDYSRFMPAQHQKAPFENDGFVQPYGDSPLDHENVGENIYLNIINRAKNYVYIFTPYLIIDHEMLTALCNAAKDGVDVRIVTPGIPDKKMIFLLTQSYYAPLIQSGVKIYQYTPGFIHAKCFVCDDEIATVGSVNLDFRSLYLHFECGVFFYRSAVVAQVKEDCLNTFACSEQMTAEFCRNRPVPVRLLQSVLRLLAPLLMNRVRKIIHTDYAYKTGLSGKNVTVAIMDTGIVPHVDFGNRIRYFGDFCEGKTGLYDDNGHGTHVSGIVAGSGEASRKEYGMPVCHGIAPQADIVMLKVLDAKGNGNTRDVLAGMEWIAKNQQEYQIRLLNISVGMLPSAGEREQQELLSAVDDLWDRGIMVVAAAGNNGPKENSVTIPGISRKIVTIGSSDDGKSEPGKRGLKTGYSSNGPTACCIVKPEILAPGTAIKSCGREKNGYRVKSGTSMAAPVVTGALALAFQKYPYLSPAEMKLRLYERAYPRGEQLGRKCWGMIHVDHLVRGMYKSFSMELAGRTLTVDIGRVCAQANGAALLKYGETTVLSTVTASDKPRDGIDFFPLSVEYEEKMYSVGKIPGGFNKREGKASENAILTSRVIDRPMRPLFPKDYRNDVTINNMVMSVDPACRPEIVAMIGSALVTTISDIPFAGPCATTQMGMVDGEFIVNPSQKEWDKGDLQLTVASTAEKVIMIEAGANEIPEDKMIEAIYKCHDVNQTIIAFVNKIVEEVGKPKHEYTSCAIPDEMFAAIKELVPPAQMEEAVFTDEKQQREENIREITDKLAEAFADNEEWLAVLGEAVYQYQKKTVRKMILKDHKRPDGRAINQIRPLAAEVDLIPRVHGSAMFTRGQTQICDVVTLAPLSEVQKIDGLDENITTKRYIHQYNFPAYSVGETKVSRGPGRREIGHGALAEKALMAVLPSEEEFPYAIRAVSETFESNGSTSMASTCASCMSLMAAGVPLKAMVAGISCGLVTGDTDDDYIVLTDIQGLEDFFGDMDFKVTGTHKGITAIQMDIKIHGLTRPIVEEAIARTREARIYIMDEVMSKAIAEPRKQVSEYAPKIVQIQIDPEKIGDVVGQRGKTINEIIARTGVKIDITDDGSVSVCGTEAEMMDKAIEMIRIITTDFKEGQILTGTVVSIKEFGAFLEFAPGKEGMVHISKIAKERINHVEDVLTLGDKVKVVCLGKDKMGRISFSIKDVPAEAMIAKDKKQNIIAEYGRTPNDTGSPEVQVALLTARIEELTAHLKENPNDHHSRRGLLKMVGQRRGLLAYLKKVDIERYRALIERLGLRKMKARLARIAGLVLAGTLVVSTAAIDQKSKNTDADTSATVASGVTSALSGSLSDAAMGVAGVSGMDIARTAQGQEAVEEGTESAEAGVDVDASTSSAAAGVSAELADAAAAASQAQDELTETESTEEQTESTEQDAAQQAASAYGYTNLGVANVEGNLNVRAAAGTDADVVGKMPNNAGCEILGVEGEWTQIKSGSVEGYVKSEYLLTGDAALARADEVKQTLATVTTTTLYVREQPNTDCAIVTMMPQGEELEVLEVLDGWVKINVDSDEGYVSSDYVEISTELLKAMTMTEIRYGQGVSDVRVSLVQYATQFVGNPYVWGGTSLTRGADCSGFVMSVFANYGISLPHSSGAQSNCGTKISASEAQPGDLFFYGNGSRINHVAIYIGNGQVVHASSPKSGIKISGAYYRTPVKVVRVINNMKYIRNTTDFYIEENTVLSLGKFDGIHRGHEQLLQYFAKKKDEGLAGAIFTFDIPPRRNVQNVEAKVLTTNEEKRHMFEHLGIDYVVECPFTQEIMCMEPEDFIAKIVRQLHVKCMVVGEDFHFGHNRRGDYHMLRQYAGKYGYEVIVVEKIKEDSRDISSTFVREEIAAGNIEKANHLLGYRYFVTSRVLHGNQIGRTIGIPTINQLPPKEKLLPPNGVYVTEAYIGDRWYRGISNVGCKPTIEGEYPVGVETHLLDFAEDVYDKMVTVEFLSRVRSERKFASIEALKEQMQNDVAYGRAYFEKHTSMMNGIINIYKEKGFTSFDVVAKLRGILKTRKIGHTGTLDPDAEGVLPVCIGKATKICELLTDKTKEYEAVMLLGRTTDTQDVTGETLTQQEVRCSAKEVEKAVLSFVGDYMQVPPMYSALKVDGRKLCDLARAGVTVERAARPVHIFSIEILSIELPRVRMRVCCSKGTYIRTLCQDVGEVLGCGACMESLLRTRVGEFALADAIKLSEVEAYVIAHRSDATETEELQLPFLQAVDTVFLKYESATVDGQFRKYLYNGNRLRPEMFLEEHESMRMAPVRVYDDEGAFFGIYEYQAEKEDYKPLKVFKMTNFDDFLAEVHTVAIGGHIRPDGDCVGSCLATYNYIKTWYPDIDVTVYLEPIPNIFKFMARSNEIVSDFSGDTVYDLFIAQDCGDTGRLGGAAHFFEQAKHTVCVDHHISNQSFAQDNYIFPQASSASELVYELLPKERITKEIAECIYTGMVHDTGVFQYSCTSRKTMEIAGALMECGINYPKIVDDTFYTKTYNQNRIMGLALLKSRLHLNGKCISSVITEEEMTQYDVLPKHLDGIVNQLRVTKDVEVAVFLYETGDGTFKASTRSREVVDVSKVAVKYGGGGHIRAAGFSMTGDADAIIEQIISDLAEQIKMRKNSIKNTRINGEVLRELSNIIRGEIKDPRINPMTSVVTVEVAPDLKTCKAYISVLGDEESQKATLAGLRSAEGYIRRQLAHSINLRNTPEITFVLDQSIEYGVRMSKMIDDVTKDIPDRADEAEEETEEMAKMRVHELAKELGIENKQIIEFLSTTEHAVKSHSSSIEDDVQKMVRDKFQKKAAPKTETAPKAEAAPKKEAAPKAEAAPKAEAAPKAAENAEGRPERPKKKSSITAVFNPQYSKQGGGRRPRGDRDRRPMNGDRRPMNGDRRPQGGRPEQRQARPANSFDVKRAFERAINPEAAKAAEEAERQAAERAKAARTAAPEKKPQETAAKQPERRENVYENVYENVYAQNPQARPQGDRDRRPMNGDRRPQGDRDRRPGANGDRRPMNGDRRPQGDRDRRPGQNGYGNRGGNNGGGRPYGGGRPGANGGQGDRNGGRGGNGYRGGNPSGRLDREIDRMNKETAASTEELRGKESREREKDRNKNDRQRNDYDALGGKKQERFVNLEKNGGKKKPNQQPQPKQEEDVIKTLVLPEKLTIKELADKMKVQPSVIVKKLFMKGTMVTVNQEVDYETAEEIALEFNCICEPEEKIDVIAELLKEEDDPEETLVARPPVVCVMGHVDHGKTSLLDAIRSTRVTDKEAGGITQHIGASVVSINGQNITFLDTPGHEAFTAMRMRGANSTDIAILVVAADDGVMPQTIEAINHAKAAGVEIIVAINKIDKPSANIERVKQELSEYELIPEDWGGSTVFCPVSAHTKEGIENLLEMILLTAEVLELKANPKRNARGLVIEARLDKGRGAVATVLVQKGTLKVGQPIACGSCYGKVRAMIDDQGRRVKEAGPSTPVEILGLSSVPEAGETFVAMDTEKEARAFAETYISEGKNRLIEDTKAKMSLDDLFSQIQSGNVKELDIIVKADVQGSVEAVKQSLEKLSNEEVVVKVIHGGVGAINESDVSLASASNAIIIGFNVRPDPMAKTTADKENVDMRLYKVIYNAIEDVEAAMKGMLDPIFEEKVLGHAEVRQIFKASGIGNIAGSYVLDGVFQRGCKVRISRAGEQIFEGNLASLKRFKDDVKEVKAGYECGLVFEGFNDIAELDIVEAYTMVEVPRMKPDKVLSMLGIAAKAGGVASGEFSTEKAVKDGRAWLVIVASDASENTQKHFRDMTTFYEVPMYVYGEKETLGHFIGKEFRASLAVTNEGLAHSIEDKLKLTLTTEMANKKIPMRQCVGCRELKPKKDMIRVIKTAAEDEASSQIVLDATGRKNGRGAYVCPNSECLRAAIKNKGLERSLKMPIPKEVYDTLTKEMEKFETRMSSNNELLEALNILEREKNISKETLLEAIENSLVTACKNHFGTSENVKVTMDPQTCEYHVFQEKTVVEQVEDPVEQISLVNAKMVDSKYEIGDIVNVEIQSKEFGRIATQNAKNVILQKIREEERKVLYNQYYSMEKDVVTGVVQRYIGRNVSVNLGKVDAILTENEQVRGEVFQPTERIKVYILEVKDTSKGPKILVSRTHPELVKRLFESEVTEVREGIVEIKAIAREAGSRTKIAVWSNDPDVDPVGACVGMNGARVNAIVNELRGEKIDIITWNENPAMMIENALSPAKVISVIADAEEKSAKVIVPDYQLSLAIGKEGQNARLAARLTGFKIDIKSETQARESGDFMDYESEYEDDEYYEDDEYAEDGEYTEDGEYAGDRYAEDADAEGEYAEESELADETDTENEEEMSKRETYEARTEELITPILERMHFELVDVEYVKEGGTWYLRAYIDKEGGITVNDCEAVAREMNEILDREDFVEDSYVFEVSSPGLGRPLKKEKDYVRSMGKEIEIRTYRAINREKEFYGILSAYDESTVTIETENGEKMTFEKPDIALIRLAFDFMSLERAKAYLKEYKMEDQIREFPVSSATVELAAEALHTEAGRIAKTLSFLVDGEAVLIVCAGDARIDNAKYKAFFRAKAKMLAPDEVEERIGHAIGGVCPFGIKEGVRVYLDETLKKYETVFPACGSSNSAIELTIPQLEQLAKPVCWVDVCKLPAMQPEAASLIAKSGISNHAASDIPDDLCFSKFGTFHKVCSMTILVTGGAGYIGSHTCVELQNAGYDVVVLDNLSNASEKSLQRVEALTGKPVTFYKGDILDRDILNKIFAEHKIDCCIHFAGLKAVGESVAKPWEYYNNNIAGTLTLVDVMRQNGCKNIIFSSSATVYGDPAEIPITENCPKGQCTNPYGWTKSMLEQILTDIQKADPEWNVILLRYFNPIGAHKSGTMGENPNGIPNNLMPYVTQVAVGKLKELGVFGNDYDTPDGTGVRDYIHVVDLAIGHVKALKKIEEKAGLCIYNLGTGHGYSVLDIVKNFEAATGVKIPYVIKARRPGDIATCYCDPSKAKNELGWEAQYGIREMCEDSWRWQKNNPNGYEDMPHHYKNSYKVTEKELVSLSVYNVGFQKCDALYQWGPGIRDHYLIHYIISGKGTYRVAGQTYHLSGGDTFLVYPNTEVVYCADEQNPWEYAWVGFTGSDASMILKATDFSPENPFIRDTPRGNDIHRQILHIYDARGNEFEHAVEMTGRLYTMLALFMHGATHAGSQNSANSYVQKSIEYISSNYSYAITVEDIAGYVGVSRSHLFRSFEAVLGRSPKEYLTDFRMKQACYLLEHSSLSITAIANSLGFDNSLYFSKTFHRQKGMSPKEYREKNRSMETQRYVYETHMHTSEASACAGSTGTQMARAYKAAGYTGIIVTDHFFYGNTSVDRSLPWEEWVRRFCLGYEHAKAEGDRIGLTVFLGWEACYEGTEFLVYGLDRAWLLAHPQIKDASIEEQYALVHEGGGIISHAHPFREEDYIPEIRLFPEYVDAVEGVNAMHSSRASDCHKNPLFNERALTYGKEHNLPFTAGSDQHTTHMIGGGMVFPRKLKDVHDFTRAVLGREAVELLDGCKSEMGWEHAAEEHKYDDIRMLVHHRSRMHPPMSLWDRAAQFSPFAALSGHEDAIRETARLTTERIELSESRKEELNEQLVWLREHPDARERVTMTYFCPDAKKAGGAYVTVSGVVKKIDEYEKMLWMEDGTVIAIEELSAVEIPGMNRYEEEMDEAHVYIAIDLKSFYASVECVERGLDPLTTNLVVADPERTEKTICLAVSPSLKAYGIPGRARLFEVVQKVKEVNAGHPKERLTYQIAPPRMALYMDYSTRIYNLYLRYVAPEDIHVYSIDEVFMDVTHYLGTYHMTARELAAKMIQDVFAETGITATAGIGTNLYLCKVALDIVAKHVKPDRNGVRIAKLDEMSYRRLLWNYRPLTDFWRVGRGYQKKLEENGLYTMGDIARCSLGGAREFHNEELLYRLFGINAELLIDHAWGWEPVTMEQIKAYRPQVNSISSGQVLHCPYDAKGARLVVQEMADALALDLVERRLVTDQLVLTVGYDIENITNPALYADYRGEIVADRYGRKIPKHAHGTVNLKTRTSSSRKIMETVMGLYDDIVNPKLLVRRITLVGNRLVEEARAEAEEQYEQLELFTDTGGQEEEKKQEELRLKKERSLQKAMLSVKKKYGKNAMLKGMNLQEGATAMERNSQIGGHKAMLKIIDDFVWGVPLIVLILAVGIFLTIRLRGLQITKLPLAVRHIIANEKDGKDGEVSSFGALCTALSATIGTGNIVGVATAVVAGGPGALFWMWIAALFGTATKYAECLLAIKYRVVEADGHVVGGPFYYIENGMGRKFRWLGQIFAFFGVGVGLLGIGTFTQINGITGAVKGFFDPETACSVHLFSNTYSWSVVISGLILTVCVALVIIGGIKRISSVAQVVVPFMALVYVVTVLIILLTHLGEIPAALATIVQSAFGLRAAAGGTLGAILVAMQKGIARGIFSNEAGLGSAPIAAATAKTDEPVAQGLVSMMGTVIDTLIICTMTGLSIIITDTWNIGLDGVDVTTRAFQIGLPFPERVSSFLLMLCLVFFAFTTILGWNYYSEKCLEYLVGNRPGVLKCYRWLYILAVLIGPFMTVSAVWTIADIFNGLMALPNLIALVALSGVVAAETKQYFAKQKNFMALFEGYERRIDQINAVLNSYGISSIEEAEKITKDAGLNVYDQVKKIQPICFENACWAYTVGAAIAIKKGCTKAADAAAAIGEGLQAFCIPGSVADHRKVGLGHGNLGKMLLEEETECFCFLAGHESFAAAEGAIGIAEKANKVRQKPLRVILNGLGKDAAQIISRINGFTFVETQYDYKAAKLNVVYEKAYSNGLRATVKCYGADDVQEGVAIMHHENVGVSITGNSTNPTRFQHPVAGTYKKECIEQGKKYFSVASGGGTGRTLHPDNMAAGPASYGMTDTMGRMHSDAQFAGSSSVPAHVEMMGLIGMGNNPMVGATVAVAVSVEEAHKAGKFMIYTKEVENMCPVAKGAKHEPAPIPEEGKWVHSKKIEDISGFTHGVGWCAPQQGACKLSLNVKNGVIEEALVETIGCSGMTHSAAMAAEVLQGKTILEALNTDLVCDAINTAMRELFLQIVYGRTQSAFSDDGLAIGAGLEDLGKGLRSQVGTMYATKEKGVRYLEMAEGYVTGIALDENNEVIGYQFVSLGKMTDFIKKGDDPNTAWEKAKGQYGRVADAVKIIDPREEMKRRWVQGMFLAGMLVLTGCGAKDSSPVENGEDYTWNDITVMLPEDWADRCTIKEDENGFTIYQTASYEKMEGLGYLCSFEKSDAWMNYGAGENLIAYTEDGTLYYLMQPTDVACDTEDQAIVEEYGSMMEEVVAIASSVKIDADDVHYDADQYVVPVGAILPVTEENLSDLSEQELYLAANEIYARHGKTFDDAYLQAHFDACSWYTPAWGATAGDAGLSEIEQANLKLIKAMQTAYEAEHIYPKSYSAGETAEIALLDNGVLNEVSYTVTGKGEQAICTLTIDGTAYDLAEYIQMHAPVADAFYVTDLVENIGTPEEDDGLEIAVLDEGTDGIGATHFFKYDGDLYYLGEVGGFPFRDRNAGFSGFNGQGGVMDLIRYDKPADCILQGYAWYNSSEKKIEHADGGLYSYYEPCKLEHKGALTVYFLMDETSAEKTIAAGEDIYCIRSDGDGWMYVRAKDGTEGFLPVTQMMETAKISQLYDLGETIAAELFAGLTYPWEALPKISDFIKKLGPTLDPEVYEQRGENIWVAKSATVAPTAFLNGPLIIDEDAEIRHCAFIRGNAIVGKGSVVGNSTELKNVVIFNSVQVPHYNYVGDSILGYKSHMGAGSITSNVKSDKTLVVVKDHDEKIETGLKKFGAMLGDYVEVGCNSVLNPGTVIGSHTNVYPLSSVRGVVPANSIYKNRSEVVEKRMEYNEQAFKEKANLKAMKVWLALIAIMTLSYGSDLSKGIYTATQYVVFLVMAWVPFAIGLLTLKLKGRATPYYKDVLALGYGFFYAYVVCITDSATAYAYILPLTSMLILFKDRSYMIRCAVTNEIVIVLSALLHVFLGLNPNVKMTDYYLQFSTLLLCYICYVVSVDHLNESDGALVASIRDNLSRVVTTVGQVKGASNSIVDGVTVVRELADENRQGADSVVSSMEELTRNNDVLHNKTMSSMDRSTDISTQVQNVAGLIDEMVTLIQESVEHADVSAEELADVMNTTDTMAALSGEVEQVLENFKQEFDMVKEETGTIEGITFQTNLLALNASIEAARAGEAGKGFAVVAGQIQDLSMGTKTSSGRIRDALDHLEETSEKMTKSITKTLEMIRMTREKLTQVQESVTSITDDSKKLGQNIGVIDGAMKEVEASNSDMVENMKQICDTMEVMTECINQSDEASRTMLSKYEESSVNVDKIESVVGKLMEELGSGGFMGIGDAQPGMRVVLVAKNGAQAAGTEFHGEVFESQSDGVLVKIKPEAGKTIEIKKKDITYELQICVNNAMYTWEDVSVSAASNAGADSYRIAVSTNPKVINRRKYPRMPVANACTVTLKKSGKAYNGRMINISAGGFAFSAHQEDFANAIGQDILLEIPDFPLEEARTLDGHIIRSTDNDGEFIVGCRMPEDSEEIQAYVNKNYREMAKSLIITEKPSVAQEFARILGVSGRNDGYIENDGYVITWCVGHLVEMVYPEEYDERYKKWRLEDLPFLPRDYKYNVIPSVSRQYDVVHKMLHREDIDTVYWAGDAGKEGQTIEENIRKFGGVREGMKELRVWIDSQTEEEILRGIREAKDMSEYDNLAKSGVMRTIEDYAMGINFSRAMSVKYGKLLNDAAGTSSYTAIAVGRVMTCVLGMVVIREREIRNFTETPFYRVVGTFHPEGEEECRITAEWKAIEGSKYFESPLLYKENGFKKEESAQTLIAELKGQEALIDSVETGTQKKRAPLLFNLAELQAECSKRFKISPDETLQVAQDLYEKKLTTYPRTDARVLSSAVAKEITKNISRLKNFAPVAPFVERIMKEGRYRNIANTQYTDDSKITDHYAIIPTGQLTELESLNSLERSVYEMIVRRFLSIFYPPAEYQTVKLVVAAGGEKLYTSAKQLKVPGYLEIAGIPKSAKERNAAKMDGEEQTQGGDAEAAQEEEENAGLLAYADKLQKGETLFSDGYAIREGKTSPPKRYTSGSMVLAMENAGQLIEEEELREQIKGSGIGTSATRAEIIKKLVRVGYLNLNKKTQVLTPERLGEMIFEVVSMTVPALLNPKMTASWEKGLDGITRGTVVMEDYRSKLEDFIRRETVAMIEQDLTGQIATRIHPLVGKGGKGLAAKRSLGIPCPVCGGTIETTPFGYGCSNYQKDGGGCRFSIGTIAGRDLNDEEVKELLTEGHTGVLSGFVSKSKKKFSASLILEKDDEGKVSVGFDFSKNQPEILEGVVCPVCGSAVEITPFGYSCVKHHEHPDECYFSVGKIAGKALGVDDLTELLTTGKTGLIRGFTARNKKKFNACLKLEQTEDGRKNIAFDFSQNDAAVVPDVVCPICGGAIVETSFGFGCANYRQDDPDSCRFAIGTMAGKDLNAAQVKELLNQGRTGTIRGFKSKSGKKFDACVALGHTEDGKIELRFDFEHVEAKKIKDVVCPICGGDIVATPFGFGCANYVKDDPNSCRFSVGKMAEKALTEANVKELLTNGRTGTIRGFKSKSGKKFDARVALAKDEKGKVTGLKFDFTDLEAPKVKDVKCPVCGGDIVKTMFGYGCANYSKENPDSCRFAIGKIAGVSLKEAQVKELLLRGKTDVIKGFVAKTGMKFDAPLKLTPEGQIAFDFPEKPKPVETTLACPKCGKMLKKSQWYYECECGFKVSHTVAKVALTEEVMRELLETGKTKDKVTGFVSKAGNTFDTCLKLEDDRIVFDFDNPGTTREGASGGKGGERMFYEELEENAQPQPLPEEDGAQYIGEDVPPFYDAMAKEYAAYEEEEAKQQAAASNFLDEFPGMVVKSSVLKELEECYREPGNQLVVLYGRTDSEKERLLGAFVQNKKHFYYRARQVAEREQRAQMGRELAAQFEVTPQKYTYEEYFNRVKSGDPTKLVVVIDEFQYIAKKDPTFMEAVLKLKAHRLYPGPVMILLCSSAVSWAERELTECIGEAACRKIDRKIKFTNLNFLEVVRALPEYPVAECIKTYGIIGGVPGYINRWNAKADVKTNICRLILSPGGYLYHAAEDLIGESLRELSVYETILAQIAAGQDKLNDLYRTTGFSRAKISVYMKNLAAFDIIQKVVSFETGGWENTKKGVYRIRDNYVNFWFHFIYPHLSDLYMIRPEEFYDRYIAPRLDAYLSRYFVEVCMEYLGLLGMVGKLPLKIARMGTWVGKEGNIDIIAQNEIRQNMVGLCNWQEPELTMEMCEALFLNMKRAKIGAEYYFLFSAQGFAPEVTAMAERDKRFVLVDMNELMSEKLRVGILGGTGMVGQRFISLLENHPWFEVTTIAASPRSAGKTYEEAVGDRWKMDTPMPEAVKKIVVMNVNEVEKVAAEVDFVFSAVDMTKEEIKKIEEEYAKTETPVVSNNSAHRWTPDVPMVVPEVNPEHMEVIKYQKERLGTKRGFVAVKPNCSIQSYAPVLTAWKEFEPYEVVATTYQAISGAGKTFKDWPEMVGNIIPYIGGEEEKSEKEPLRIWGHVDPEKKAIVPAKSPVITCQCIRVPVLNGHTAAVFVKFKKNPTKEQLIEALRNFSGVPQELKLPSAPEHFIQYLEEDNRPQIALDVNYENGMGISVGRLREDTVYDWKFVGLSHNTVRGAAGGAVLCAELLKAQGYITAKMAQLWGGRFTKQTDKLVYNFNASISFDQKFYKQDIEGSIAHVRMLGKQEILTGEEMQAIVACLKEILADVEAGRLVITDEYEDIHSFVEANLIDRLGDTGKKLHTGRSRNDQVALDMRLYTREELLHVDVLLKELLGTILHIMEQNTETIMPGFTHLQKAQPITLAHHMGAYFEMFKRDRLRLHDIYERMNYCPLGSGALAGTTYPLDRAYTAELLGFYGPTLNSMDGVSDRDYLIEFLSACATIMMHLSRFSEEVIIWNSNEYQFVEIDDAYSTGSSIMPQKKNPDIAELVRGKTGRVYGALMSLLTTMKGIPLAYNKDMQEDKELSFDAMDTVKGCIALFNGMLATMKFNKERMRASANGGFTNATDAADYLVNHGVPFRDAHGIVGQIVLYCIEKGIAIDDMSLEELKAISPVFEDDVYEAISMETCVNKRLTVGAPGKEAMEQVIAAEKKYLEEEWKPLETSIQMRAQKNYQKMLEATIAGLKEQNRVPTLLLHSCCAPCSSYCLEYLSQYFHITVDYYNPNIYPEEEYHMRVQEQQRLIRELPAKYPIAFREGAYDKERFYEMARGLEEEKEGGERCFRCYELRLREAAETAKSLGMDYFTTTLSISPLKNAEKLNEIGDALAEEYGVAYLNSDFKKKNGYKRSVELSEQYGMYRQYYCGCVFSKRERDAQIAAKAAAQGIMMQERKQKGKILVFSSREICYLSSNFFANQIGAAFEELGYEVTVCELSKEDDLDAKLARYIGQPYRLILDFNSLLPRMVLDDGTPYVDRLAGPFFDYILDHPLFHYQGLSSGVKNLHAIVLDEAQQKYVEKYYEKVASVHMLPLGATRAVYEGTKEPECRILFPGTYDRPDAVYQIVENAPEPLGSMMKDLIERRLADPTLPMEEAFSQHLKEEELELPAGQFALFMNSMYAVDAYVRDYFRKAALDALLAKKLPVTVFGEGWEKYSCGDGHSLRREPAVPFALSFERIAKAHVLLNVSPIFNRGMHDRVPAGMANHAVVLTDENPYLRRTFTGGKELLFYSLEKPDTLCEQAERALTDVRLREKIAASAYETFEREYTWKRRAEQILAFAEEVEAMLEKLFLEMISYYSGDPKRIQHFTKVHSYAKLIGEREQLSPEELYILEAAAYTHDIGIKPAEEKYGSSAGKLQEQEGPAVARGMLMRLGFAKDVIERVCYLIGHHHTYTGIEGRDYQILVEADFLVNLYEDGRPDGDGGFMPDKAAVETAYQRIFATETGKWICRSMFALGGVSMGEIANRDNKKMLILFAEVVAALATILIAVLAMKIPVVPVCVIVLIEVAIAACLQEVPVWVHAVVAAVQLVAGAICGRVVFCLLCILIYVFAILTLREARAMNDTKWVSMWGNAMSIAEHHPEGYAKDLTLRYPVYAPFSGSALRFTLDNYCGKEPVTIHRATVAVCDSDLTGKVPLSCPLAAGTIRDITFDGSHSVTLAAGASATSDALSFPVSAGQTLCVSLYFDGYTAMQSAVLITGPLSRGYFSYGDQTHSEALPLATSKATNWFYFLSNIDILTKEDCHAIICYGDSITAQAWPDYLTLRLIEEGHNHTSVIRRAASGTRILRQYDCITYDSYGLKGTNRFAHEIPTAGADTVIIQQGINDIIHPVGTDVNPFRPMSDLPTAAELIDGLKWYIEEARKLHDSVYLGTLLPIYGWRTYAPFREKLRGAVNDWIRSNHESDGCIDFDQALRAADDPRSFAKGYDSGDHLHPSNPAYKKMADTVPATLLRMNTILIGIAGGTGSGKTTLADKLIDSFGDDEVSILRHDNYYKRHDDMCYEERSKLNYDHPDAFDTALLCEHICKLKAGEQIYMPVYDYSIHNRSEETILVKPAPVIVLEGILIFAEPSLCDLMDIKVFVDTDADVRILRRIIRDVKERGRSLDSVINQYLTTVKPMHEQFVEPSKRRADIIIPEGGENIVALDMLIERVRKHLKNKMISSKYFDHTILKAEATEAQVAKICDEALANDFASVCVNQYYTRFVAEKLKGSDVKVCTVVGFPLGMSDTGVKAFETKAAIEDGAQEIDMVINVGALKDKKYDYVKNDIHTLKEVCGSDIVLKVIIETCLLTDEEKVKACELAKEAGADFVKTSTGFSTGGAKAEDVALMRKTVGDDMGVKASGGIHTAEEAQAMIDAGASRLGTSATLAIIGKMFLLIKFTLLYAVVLMLVALGGMFSERSGVINIALEGIMAIGGLAGVFVLALCGDSLPSGVLVAVSILASAVAGILYSLLLGFSAITLKADQTIGGTALNMLATAVAIVAVKAFNNSSAAGNGAASAKLSYSNKAFIYKIGPLTINIFLIIGIIILIVSYVFLFKTKWGLRLRACGEHPQAADSVGINVYQWRYTGVMISGALGGIGGFAYIVPSVTTWNFEVGVAGAGFLALAVMIFGQWKPFNIAGAAVFFAVFRSLANIADSTVLANLGLSKNIYSMMPFIASMIILAFTSKNSQAPKAEGIPYDKGARMSEKTKDVLLSIFASLLCIVIGLLVGLIILYCINAENALDGFSRIIKGGFYLKPKGIGSEIAQATPLIMTGLSVAFAFKTGLFNIGAAGQYTLGVFGALYFALILQMPWYVCLLAAMVCGAIWGAVPGIFKAYFNVNEVITSIMFNWIGLYLVNELMYSTVSGMYDQKTTRTYKLSSAAPQSLIPDCGMSAVFKTSSTTIAIFIAIAIAIIMYVVLNKTTFGYELKACGFNKDAAKYAGINEKRNIVLSMTISGALAGIGAGLYYLSGASEWNPQVSTALPAIGFNGIPVALLALSNPIGVVFAAIFVAHISVGGAYLPTKYYQPEIADLIVAVIIYLCAFVMLFKSVVVSKLGRKKAKKEDVKMENEYVIEMLNITKEFPGIKANDNITLQLRKGEIHALLGENGAGKSTLMSILFGLYQPTSGTIKKNGQVVQINTPNDANDLNIGMVHQHFKLVECFSVLDNIILGVEPSKGLFLEKDGARKKVLELSERYGLKVEPDALISDITVGMQQRVEILKMLYRDNEVLIFDEPTAVLTPQEIEELMKIMKNLAHEGKSILFITHKLNEIMEVADRCTILRKGKYIGTVDIADTTKEELSKMMVGRNVSFTVDKDEKEPGDTVLEVSHLTVASRSHENNAVRDVSFQVRRGEIVCIAGIDGNGQTELVQGLTGLEKVGKGTVKFMGQDITNATIRERSKHGMSHIPEDRHKHGLVLDYTLEQNLVLQRYWQPQFERAGFIKSGEVRRYAQKLIEQYDVRSGQGPVTIVRSMSGGNQQKAIIAREIDKDPELLVAVQPTRGLDVGAIEYIHKQLVAQRDKGKAVLLVSLELDEVMDVSDRILVMYEGEIVGELDPKKVTVEELGLYMAGAKRDKVAKEAMKKKVISLLLTAAMATTMFAGCGSSSEENTTADNNQTAAPAATEAAAEESTEAAAPAVSADGKIAMITDSGDITDESFNQITWETCVAYGDKNGIEYQYYKPAEDTDEERINAIDLAVADGATVIVMPGYLFGPAIAEEQDLYPDVSFIAVDVTEADIVDLSGNAVGISDNVYICSFQEEQAGYLAGYAAVKDGYTSLGFLGGIAVPAVIRYGYGYIQGINDAAEEMGVDVDVKYYYGGQFYGSDAITARMEGWYQDGTQVVFACGGGIYTSAVEAAEQYDGKVIGVDVDQRPKIGDLCITSAMKGLGSAVNSALDAYFGGNWASIGGKSEQLGLAQGDYLGLPTDTDSWGFTTFTVDEYNTVLDGLKDGSITVSNDTENQPEVGSHVTVDYVEMRKKLINLMHIAKSYGDNVILDDLNLYIRENEFITLLGPSGCGKTTTLRIIGGFETPDKGQVLFDGKDITALPPNERDLNTVFQKYALFPHMSIAENIAFGLKIRKKSKAYIDDKIKYALKLVNLDGFEHRSIDSLSGGQQQRIASARAIVNEPRVLLLDEPLGALDLKLRQEMQYELIRLKNELGITFVFVTHDQEEALTMSDTIVVMNQGYIQQIGTPEMIYNEPVNAFVADFIGDSNIIDGIMMKDRVVEILGTRIPCVDEGFGTNTPVDVVIRPENVEIVAPGEGFMDGDITSVIFKGVHYEIEIMVGGFEWLVDTTQFYTVGTHVGIRVIPFNIQIMNKPESEDEEAAEIDVMSNFKKQLLAGPYLIWMIGFILLPLVFILYYAITAADGSFTFSNIAAIADPVHVKSILLSLKLGFLCTLFCLVLSYPLCMILSTFRFRHQSFVVFLFILPMWMNFMLRILAWRLLLSNNGIVNAILEAVGTGHVKMLNTPTAVVFGMVYDFLPFMILPIYNSMVRINKDVIEAARDLGATNLTVLVKIIFPLTLSGVLSGIVMVFVPALTSFVISDLLGGGKVLLIGNVIEQEFMQGTNWHLGSGLSVVLMLFVIASMALMNVLDKDEGGTAVWMRPELYALSTILFLFAFLLLLVMNRRSDRIAGNHAGIHMKRFHYALITAAFAALLLSACGSADTDTAGSSGDNSLVVLNYGKYLDSSAIKMFEQETGIKIKLEEYESPEEMYTKFSAGSISYDVVCTSDYMVERLIHEGKVAPIDFSSFSYYKNLDPAILAAAEVFDPQNQYSMPYFYGTLGILYNTTMVSEEETDLRDALSLLVEQKPLVYAYYVDETADEMIAGNAALALVYSGEAATAMESNADLSYTVPKEGSNLWIDSWFIPADSTHKENAEKFLDFLCREDVAMLNFDYVCYATPNQAVVDALDEDTRNDTTIFPPDDVFANCTVYKQLGSDTTELYSYLWKTLKSEMNYHDFKQQIISTLSDRLGSDVRITVSDILKNNDTHLDGLTILAPGQNLAPTIYLDYYYGQYERGRSFSDITDDILTAYRENRPKSPVDISFFTDYDKVKSRVTMKLINYERNRELLKRVPYYRFLDLAIVFLCLVESDSSGTATVLIHNEHLTYWGITRDDLYALAMANTPQLLRYDLRSMTEVLRELFADEFADPAGSDLIEPFPIYVLSNQHRLNGSSCILYQHLLHDFARRIGSDFYILPSSVHEVLLIPADNQISMSTLSSMVRDVNSSQLAREEILSDHVYYYSLETDQITMMMKILFAASEAVPFMKTGGLADVTGSLPGYFDKKHFDVRIIMPKYLCMDEKWKAQLRFVCHFYVNLSWRRQYVGIFETVQNGITYYFVDNEFYFAGDKPYHNIYEDVEKFAFFSKAVLEALPYLDFWPDVIHCHDWQTGLVPVFLRTFYGDQRCYSNIRTVFSVHNLKFQGRFSLPAVIDITGLPEQIFSSDKLESYGEANYLKGGVVYADAVTTVSPTYAREIMTPEGGEGLDGLMRAREGSLYGILNGIDIREYDPQTDAYLANHYNETNHTEGKGLNKLKLQKLLGLPVDKDVFLLGMVSRMTDQKGFDLIAYVMDELMSTERLQLVVAGTGEARYEEMLRYFAEKYPQKIHVTIGYSEELAHRIYGSCDAFLMPSLFEPCGLSQLMSLRYGTVPIVRETGGLKDTVMPYNEYEQTGTGFSFANYNAHEMLGVLRYAMRVYYTQRKCWNGIAERAMREDFSWKKSAETYARLYEDIVGRPMEQIYEIEPLLKAGACIQIHPQGYSMYPFIDPRRDEVVLAGIEDGSALRRGDVVLYRRENGMLVLHRIYKIGQDGLYLLGDHQTAIEGPVRREQVKGKMTGRVRDGRYMDVGNPGYRMLSVVWLWLRPARRAIMVPAARLRRMVRFALFRRNNKRYNKMKLNDRYIKATLAGIPYLLPYGQLIADPAPATRLNDSGALLWDGILEGDSREELLALLADRYHATERERAALAEDVDQYLHSLCRMGILLADTPESRGDDTPPLFYRIGPLVFSYRGPSLLYDRFFSAFSCEEEDFDQEVLILTGKPASIPYGAVLIHTEELTICDSGSSYCFFFAAPWGIREMHVKKDGSRAVLYRMPDPDDMHLEDLFHALRFAFLILTQQKELYVLHSASFLYRGRAFLVSGSSGTGKSTHSALWHDLYQTPLLNGDLNLLGIRNSIPYAYGLPWCGTSGICTPKDYPLGGIIFLKQAAIDQVQSLQPDEKVLHILQRMISPAWTKELLLRNLHFSEALAPLIFSCRLYCTKEPSAARTLKAVIDALMLEKFRHYRERIKEGMLRDMWRQTLWIYEYARIYWKQMIFYTVLGLAGTLVSLISSLISRDMVDIVTGQQAGLLARTFCLYIGFSVGNVLISQISNYFANKISISVDNAIKADIFEKMLLTDLESIQNYHTGDLLTRWSSDASNISSGVLNWIPNLVIYTVRFVSTFAVVFYHDPMFALLALIGMPVSMLMSKTLLRRMKGNNERSAAMSAKMSGFNQEAFSNIQTIKAFDLIRLYAERLRGLQREYLTMKLEFQKMSMATSILLSIVGLAVSYSCYGFGIYRVWSGAISYGTMTMFLSLSGSLTGTLNQLVSLVPTAVSLTTSAGRLMDILDMPKEDFSDADQVEQFAGQNRSDGIGIVFSGVSYAYHNGKQVFCGADFLARPKEIVALVGPSGEGKTTMLRLILGLLHPQEGERILIGETDGEKIAVDPSARRLFSYVPQGNTMFSGTIAENMRNVRPEASDEEICEVLKAACAWEFVEKLPDGIYSMVGERGGGFSEGQAQRLSIARALLRRSPILLLDEATSALDVATERRVLRNIMSTTEPRTCIVTTHRPTVLSICQKVYRIREQKCVQMQEEEIRQMMREFMTNYESPVILRTEELAEGVYLASGCYTASAYIHQTPQSGSGEYRIQVNGQHSADHTKEAQTLTISFSLPVTYTSSGGSLVSGSGTNTLVINYNYHQNPTDNIGLGDLVVQADAGLAVTSVNITDMKNYERPVMIRTEELAEGVYLASGGIKCDSVYMNGVWQAPDYSDWNGTTRGYKQQFGCLGCPANTASGCGLLSHYVDSGYAGSYDVDNGNRKPSWEKKGYGPDDAVTDWNMMQNYEKPEVILMTECSEGVYLASGGQTGEDPTAGECDSRYMKGAWKKPDYSNSNVQMRAYDRKGCEGCAADDGDGCKLQKGDAKVAGNVYQPVWEQKGLTPDTMVWMSGRWKRILALGAAVVLCLIAAAQMGSLFHWKVTCTPAAFAESSRRLSNPDRGFYYIYGYRITDEPVDYATDLRDRTREDDATRLGMMQINLREYRTGAISEEGLSNVRQLFAAMADSDKKWIVRFLYDWNGENEQYEPENLDIILQHMEQVGDVIREYHSCIYTLQGLFIGNWGEMNGTKYTDPDSMRELAARLADVSDASTFLSVRTPAQWRKITGEAAPDGWTENPLAKRLGLFNDGMLGSVSDYGTYSDNTRQDAGDFSAWTREEELAFQDVLCSSVPSGGEVIVDNPYNDLENAIADLKTMHVSYLNEDYDRNVLDKWAGTVVNTDDCYDGMDGWSYVERHLGYRLWIAGAALSHSFWADTVEVNAALKNSGFAPFYRQTKVCVSVTDEAGAVCYTDEWEEELLKLSGGNEDDRELALTGTIPIRGWESGTYRVYINLSDADSGEQILLANEADATENGYCLGEVAVRMDTWYWALEYVRVFFAYVMILFVWPSVVFRDYLRGRSRTVRFAFCVTVPVVLLNTVVLSLGVFHILYGWLIAVLFYGTLLLGLLRWHPVRREQIKKISRLFLGTYGIRLLLLRLHNRVKNGIGHAHAQFRRSIRGRRCVYLMLGVVVCFGMVYFSYGAFHDYSYGFGDMYRHHSWIYGLLNGTPFYEGIYPEAMHCFIYAMRVLFGVKIYSSQLFLAGIHVAVFLVSAYLLLKELFAWDGTAVLALALFLTVDLLCIDEIFSMSRLQWTLPQEFGLYTQFLCALFLLRCLKTDFSDRSGSRRERIRKFLTDENLLLFLLSLAASLAIHFYVTMMAFFLCVVIAACRLPALFQKRRFVSLVKAVCLGVLIAVLPMGIAYAKGVPFQGSIGWAVNVINGTDTAEGRTSQAEQILEQAQTSSEQTSKEQTWSGERMTESGETTEAAVQPTEQSHGGNGQTPDGGSADAGQNSAPKQSAGNHMLAMAERMAASFAGKAQLVWKYGYVQLYRENRAEWIVVFSGLALILWAVYRMAAGIITGLLKKGSDSKKIRQLFDGYPVLVGISVLLMIVYAAPFLGLPELIAGSRLCSTEQLFILAVVVIPVDLAAGAIALTPGRRVLPLALAAGVAVIYVGTRQLGIFHGYLYYELTRYNAAVMVTQDITDKFPENSYTIVSTTDELYQVIEQGRHEELLTFLNRVNGSGYTLPTEYIFVYVEKRPIQYAQNHFFTGPDWLAEEKYTSYYTTYFSEGNSINASEISREQAEKEMMTFSKLSQTYSNLDSRTILESKAYEWCRKFEASYPQEMKVYYEDENFCCYIIRQNTYRLYQLEESMRQQMEEEQWDLCRLLDAALHGRPAEMLPPAEKYGAILELADRHRVLPLLYDVLAPKLPEEDETRKRLEKRSAETVRQSYRLLFLGKYVTGLLQEHGIETVLLKGSGTAGLYPVPELRKSGDIDLLVADQKAGEKAYEVLHEHGFRKASEQHAHHHIVCVGTEQIGIEIHVALAEPFDSKSVNEWLAAHQAEFLAHCERTAVMGVEFPVLQPAYHAFYLLLHMLQHFLRAGFGLKLLCDWVVFWEKGYGSGVEERFFSMAEECRVMGFARLVTAVCVKYLGLSGEKVPLLLCRFDWEAEAANLEAFLTEILEAEEFGKSSADRMVALRGTGWRDYCREFHHQMLLTYPGAGRYRILHPVLWVMMFCGFAYRNVKMRRVSGYAVLKKARARGKLVEEMKLFRMETKSRTEYSAMNTTVAVISRMTAILMGFVTRVIFTHTLSENYVGINGLFTDILNVLSLTELGAGTAITYALYRPIAEGNIKKQQQLMKLYQTFYRGTAVCVGVLGLALIPFMDVLMKNRPEVEHLTFIYLLYLANSVLSYLLVYQRTLIEAHQMNYVVLIYQTGFLVLQDLLQIVVLLTTGNFILFLLMYLMCTVLSNVCISRKAEKLFPYLKEKEKERLPAEERTGLFQNIRAMMMHKLGTVVVNNTDNLLISAFVGVVSVGIYSNYYLLIGSVRQVLDQVFAGITASVGNLGATEDQGKIREIFETAFFIGQWLYGFAAICLYELLNPFVELAFGRQYLFERSVVMILCLNFFINGTRKAVLTFRDSMGLFWFDRYKALAEAALNLVLSILLVRQYQTLGVFIGTFLSTILTSVWVEPFVLYRRRLHLPVHRFYLRYLLYAVCVGAVWIVTDLVCGLAEGSPLTVLLIRLPLCVVLPNLLFFMAYGRTKEWKRVLERLRRIEWVRLHRGGMMEEKKETQIDFVIAWVDGGDPAWQRERDRYGKMGEKTAAEETGEREKSGVAYDTRDVRYRDWDCLRFWFRSVEQNAPWVHKIYFVTWGHVPKWLNGNHPKLEIVRHEDYIPGEFLPTFNSHTIELNFHRIPGLSEQFVYFNDDMFLLQQVSPGQFFRDGKPLDMLALQPVVANREDAVMPYIYLNNAMVLARYFDKRENMKQQPGAYWHPGYPLLYFGYNLLERMFPRFTGFYTVHGPSPLLKNTYEALWQREGALLSEVCSHRFRSREDVSQYLLREWQKLEGNFYPVNACRFCRYYDLSDQNTSLLHVIEKKKSPAVCINDSQKVEVYDRVKRELNEAFLKAFPKKSSFETDGAGEKHMFSWTKRSKRSFHAENLKRQQKPYIAPGRGWYHIYTFRLGRPEEVSLDWLPDYPGETLALVRLDIRDYASRELDTLALDFAEQIFRAFQERKKEMILRVCYDTEGKGMEREPQRIFVVQRHMQALGSLAERYADAILTVQGVFVGSWGEMHTSRFLRPDQICLLAQTWQEATHHALTLSVRKPVHLRMLAGNRPVRGLGLYDDAMFAGADHMGTFGDVPREAADWEEPWCAADEQAYLSGQDENILCGGEALAGIKLSAETVLEELQKMQVTYLNSIYDPARMAEWKACRLPSGKSLYEEIGSRLGYRICVLCAEWKKGSLWVTLKNEGFSAVCQKTDLLLIRECDEGKEQKVQKVPYEICGLKGGQTDVAKVEIAAGEAGGEGKEEKLYLSMVRKKDGKTLPFANEGAGSRLLIGRWMVQGGLHGREKGNTDMVEKKQKELLIIIPAYNEEKNIERVLEELERPEIAEIADILVMNDASSDSTNWVVKAHGHTLVSHVFNLGYGSALQLGYKYAIRRKYSYVIQMDADGQHDVCNIPVIYQRLKQQDADGRCPDIVLCSRFMEGSAEYPVSATKKLAYGFFRWMIKISTGRKIADPTTGLQGLNRRAFLYYSKYKHFDDKYPDANMIIQMQLLGFRIDEIPAVMHARSCGTSMHSGLKPVVYMFRMVFSIIGVVFRIKVLGIDAGAGERDVFMDKKEMFVINTLSRAGAETALLELLAQLAAERGEDGQPRYELSLFVLMNQGELVQQIPEGVRLVNPRYAPVSVLEPKGRIYMGMTVVKCLLHRANLIRLWRYHWRVARAMRKEGRLMPDKLLWRAISDGARRFPEEYDLAVAFLEGGSAYYVADHVRAKKKAAFIHIDYQKAGYSRELDRDCYLQYDAVFPIGEQVKRAFLAVYPECSARTRIYHNRIDCEKIRKMSRQPGGFTDDFDGIRLLTVGRLTPQKAYPVAIEAMRQLKAEGYPVRWYVLGEGSSRRELEQHIASCGLKEDFLLLGAVENPYPYYRQTDIYVHATGYEGKSIAIQEAQTLGCAIVASECNREQITDGEDGILCALDAAAVKEAVGFLIRNPDRRRAYAQAALKRPVNYENEERLLEQLLSEKEMNVILILRIFLTAAGVLFLLGDINAYVRQKLTDTIGLLWAFVSVALILTGVVSVPGAREEEYLVVLLLAVCLLLLILLFKLSKVVSVLSMKNQELAMQVSLLNQENERILHRLGILTDEKKDIVRDMAGIGIKLQKIYEKKTILAYLTGFGYSAVVTVAPMFVVIGTIMLMSQLLGYENVGYARRGLFSGTLLYIFIFSLLTAAPFNAVLSRYMSDVIYEERYEDILPCYDVGLLLNILLASLLGIPFCAWEHLVGHVNLIFVFTGFCGYIALVLVFYSMLYLSICKDYQKISLYFLTGMAAALACALFFVKVCGREIVYSMLLSLTIGFFLTAVLEYATVKRYFKRNSNRYRRVFSYFGRYWKLVVINFLYTLGLYIHNFVFWNTDLQMRVADTFVFAPTYDLATCLAMFTNLSSTIIFITRVEMHFHTRYKAYSEAVIGGRWEDIKNTKDRMFRQLSAELMNLVRIQFIISTAVYLLCVVVLPQYGFSGRVMQIYPCLAAGYFILFILYAEIIFLYYFNDLTGALLATLGFCLVTWAGSVLSAGGSDLWYGMGLVAGSFTGFTIAYFRLRFMERHMDEHIFCGGQLFTVKRERMPESMVYTKKQKERMRICIVAEGCYPYVVGGVSSWIHSMIKIFPEYQFVVLAIVANRSLRGKFVYDLPENVVEVHELYLEDADWRPKELKRAARLKLNEREYAALRSLLMNQNVDWDTLFSFFGEKEFSLNELLMGEDFFRAVQECYTVRYAGAVFSDFLWTMRSMYLPLFLTLGMRLPRADVYHCVATGYAGVLGSMAKRRFGCRLLISEHGIYTREREEELIRADWVSGIYKNIWIEQFKKMSKLAYDRADLVTSLYAHARELQIELGCPADKTSITPNGIDPARFDGLKRPEAMEPDMVHIGAVLRVTPIKDVKTMIRAFAYAKRDVPNLKLWIMGPTEEDEEYARECFELVELMELPDVVFTGRVNVTEYLGGLDFTILTSISEGQPLTVLEGYAAKLPAIATDVGNCRGLLYGEDDDFGEAGILTHIMNVKEIADAMVNLARHPVRRKQMGENGYRRVMAKYKISDMQQTYRKIYETFENIDWMVSRRNYLTIAMMFVILLFMFQFTGVMKEQLSEYESNEYADDTTTSFQRSDAFLAEQTSADACEVIYVGEAGGAEESVVKTWCSYRKRTFFCSSSLALLDSLQDDVLQVLVVDGSKVTSEEEVAVLRREAQMGVTVIFATLPQSSVIREYRDLRELLGIRAVIADEIPLAGMHLFSGFLLGGEEIYEVTELGEEERQDMNPSVPWYTTGAGTKTYMVGTLSDETIEQTVDNEIRAQYAGMEEEAAKNSLLPAILWRNSVDTAKIFCVNGDYLADISAVGILDAMMGETYDYDIYPVINAQNLVIADLPAFVSENEEEMQKRYSQSAQAVYQEIVWPSLTSIASRTGAKMTCMMTPQFTYTDEEEPDGENVTYYLKRLKEEHAEAGLSADSMEGIPLSEKIKQDQTFWQTYAPSYRFLSLYADGVKSIGEKSALPAEIRTVALGSGASGQAVGYLNENVTLQPSTSSGIRHTFLDDFKVKCMETALGYSNITLDFYSVTYPEGDEDSWEKMSKKIAANLGTYWKAYEAFDATTLTESDVRIRRFLALDYKQQRAGNVITLSLEHREDAAWFLLRLHGEKVTEVAGGIFEEIEDGVYLILAEEDEVSVEVQTGETWQYQDGGKRGDGTMSRIETYFLLLVVLNLCITAAYVLWNEQHWREEPGKRTGGRIRAAVMLLAPVIGPVFFVAGELARHLLFGQSADLEDVIFSKERVRTHFMADEEQERNVVPIEEALAISDRDSLRTLIMNVVRGDVTDSLGSLALALDSEDTETSHYAASVLRDVLNDFRQHAQKLYRQMQKDGREAGDDACLLIEYMYVVLKQNVFHETEQRTFVDMFEEACELLYEKDYRKLTAQYIEWLCELLLRLKEFGRMHYWCNRSRELYPDALSTYTCYLKMYFTQEKKTEFFRELDRLKASNIVIDRETLELIRTFSMNILLVGSKCRFLQLLTDKLDKEGHRVFLLTAEDKSVRTSKKIFETYHFAYDNPCIREVLEGVRPDVTVFMGAYDTGFLWGKGSSTASAYTSGLFQLLMNETAGNVGRFLYLSSEEVFGGEYTQDISCEENCAAYTVRAQAIAAGEELCRSYFNMGYETIVLRLDHLYGEPLTGAEARDICARMSVEGLETGEIRVNPHNRVALLHYSDAVEFLYAVITAKKMTYGVYQISSGETISVRSAAEFVAAELEGVKVVEDTGRERMDPVLSNQRFAEEFGIRIVHKPETEIGREAAYIRQHASSFVRTQSRKKGWSRFGERSREAVRAMIPFAENLLCFLPFFLLNNWMAGSAYFQNIDFYLLYVLLFAITYGQQQATFSSILAVAGYLAVQMYQRSGFDVVLDVNTYIWIAQLLILGLVIGYMRDRLHAVEEEERHEVDFLSRQVEDISDVNGSNVRIKEILSNQIVNQNDSFGKLYEITSSLDKYEPSEVLFYAAEVLAKLMDSQDVAIYTVANHSYARLFSATSPKARMLGNSIHYVQMEEFYEKLREKKVFINKTMDERYPLMADAIYSEDEMQLILMVWGIPWERMTLGQANMLTVIGYLIQNAVVRANRYLSALEQQRYIHGTRILEADAFASLVKAYLNAREKKLTECALVVFEEGETSREEAAGVLSGMMRQSDYLGELSDGKMYALLANTSAEDAGMVVERFRSAGFPCRMKEEMELMQKNRYQLRCAAGKYWLLDMEQDGETYRPPLMLNESGAYIFRQYMAGNTADKIAEELATMYGGTADDMRTDVMQFIRQMELQGILMEKLNVAIADDNERMLRLLGDIIESDDELNVVGVARDGEEAYHVIKAKEPDVVLLDIVMPKLDGLGVLDRVSQDTSIKKHPAFIMISAIGQEKITEDAFARGADYYIMKPFDNDIVLSRIKNVRRPAAGRGAEVRKVNAYEKAEETKERNLEADVTDIIHEIGVPAHIKGYQYLRDAIVMSVNDMDMLNSITKILYPTIAKKYQTTSSRVERAIRHAIEVAWSRGKMDTIDEMFGYTIHNGKGKPTNSEFIALITDRIRLEYKMHMEQQEHIQKLADEYYEEGRARFFDHKLEEAAMLVQNALHLYKKCDDMLKYATALNLLGVIYGATGNETMAVDYLVEGLECAIDYQLNNITTLFYNNIGSRYQELGEHEKAIDYFLKSARELQNPTCIKEERYRSWALITYLNLAVSYYELNLYELSYKYLEQAERQLDEEVEEMYHYTVLIFKCRLLWQMGKGDYVYEYMEDLLASGEKDSNASDYLNDMKDLCQLFRDMKEYEYWKQTISAVETYTIDQKTVFFQLFLTELWMDYYQTVGNEERYVELCVAHADLYKRQKAIDAKDRATAIDIKVQLREKEAERKRVETMSVTDALTGLGNRYSLEREAVHIIRDAGGERITVGVLDIDCFKQLNDTYGHIQGDCCLKVVADILKEAVMDCGHVYRFGGDEFVMLFPAGMENRIEEIAEAILQKIAEAGIANEHSVVQPNLTISQGYACFVPEGTESGARLIEHADKALYYVKRNSRNAYYIIREMVSSFLLCGGLWVTENGMGADMRHKFYFLIQQITWVVFLFLTLFAVKTFERALPDEIYVPFGEKADYRFGVPVSVTLKDDSEEVFYRLNGQEDAVAEAPFYTVTCKLFGIFPVKDVKVMMVDRQEVTAGGEAIGIYVKTDGILVLGTAKIADAWGNECSPAQNLVQSGDYIVSVNGETVCGKEELMDKIDSYGSGREIIGVMRKGEYVEVSMNPVKGETGKYRLGIWVRDDLAGVGTLTYYRQDGSFGALGHAVSDGDTGVQMSLSEGYIYETKIVSIQKGKNGVPGELAGIIDYGKSHCMGSITENSPLGIRGMLNDTAGELEGEVYEVAYKQDIALGKAYIISEVSGERAEYEIEIESLDYSGDEENKGILFKVTDERLLGLTGGIVQGMSGSPIIQNGKMIGAVTHVFVSDASMGYGIFIEKMLMLQSLHVKNLALIDEAEVDFTRGLNILSGETGAGKSIIIGSINLALGEKVQKEMLREDPQTGEFAPALVELVFTVENGQERQKLEALEVYPEDDQVILSRRIVGGRGTARVNGQSMPASAVREIAAILIDIHGQHEHQSLLSKRRHLEILDAYVGETLTEKKKALAETYRSYKKLVEEEKNAGIDGAEREREVSFLEYEIREIEEAGLREGEDEELENEYRRFSNGQKIVNAVNGAYSNTGGESDCASELTGRAVRELSSVSGYDEKLAELERELLEIDGLLSDFNRELADYVENMEYDEETFYQVEKRLDEVNHLKSKYGSTIPDVLLALEEKQERLMQLKDYDTYLAGLKEEIARTKKVLEKQSSEVSAMRKEAAERLTAAVTQALLDLNFLDVRFTMNFERMAEYTANGFDDAEFLISTNPGEPLKPLGKVASGGELSRIMLAIKTVLADEDAVETLIFDEIDSGISGRTAQMVSEKMNVLGRSHQIICITHLPQIAAMADSHYLIQKSVQNQTTVSTIRRLSEEESIQELSRMLGGVEITETVKESAREMRALAKSKKSGFEKMKTKRQAKMLELIKRNDIETQEELSDYLEREGYQVTQATVSRDIRELKLTKVAMSNGRQKYVALQETDENLSQKYVRVFHDGFVSMDMAQNILVIKTVSGMAMAVAAALDAMHMHEIVGCIAGDDTIMCAIRSVDDTVAVMNRLKKLVEDMTGRLPDVGKLMRHFLIITNTYKDENGRLTGELAAYIRKKGGECDCFYSDGERKSEAAPALDKMDPATDCVMVLGGDGTLIRAASRLVDSRIPLIGVNLGTVGYLCELEESNVFDAVDRLMADDCMVEERMMLTGAGILGGVREEYGVALNDIVIHRTGELSVVSLIVYVNGEYLHTFRADGIIVSTPTGSTGYNMSAGGPIVDPKAQMILITPINAHNLNSRSIVIGAEDEVVVEIGRRRSQKDETLEVSFDGDTAARLVVGDKFSIRKASDTTRILKLSNKSFLEILSKKMQVYTMKERLDVLLVNRGLAPSREKAKTMIMEGNVFVENQREDKAGATFDTEAEITVKGNTLKYVSRGGLKLEKAMTHFGITLEGKVCMDIGASTGGFTDCMLQNGAVKVYSVDVGYGQFAWKLRQDPRVVCMEKTNIRYVTPADIDDVLDFASVDVSFISLTKVLIPARELLRDGGEMVCLIKPQFEAGREKVGKKGVVRDKAVHEEVVERIIEFASQNGFFVKNLEYSPIKGPEGNIEYLVYIRKDETGGVDAAVDIKAVVDAAHGELDKMILERIQKENDIKELSDEELKILASEIRQFLIEKISDTGGHLASNLGVIELTMALHLFLDLPKDKLIWDVGHQSYTHKLLTGRKEGFDQLRKYGGMSGFPKRKESECDCFDTGHSSTSISAGLGYAHAREITGEDYKVVSVIGDGALTGGMAFEALNNAAQLNSNFIIVLNDNNMSISENVGGLSTYLAGFRTADAYRDLKLGVMNSLNKIPVYGDKMVERIRRTKSGIKQLFIPGMLFEELGIIYLGPVDGGDIKGILKLLQEASRVDGPVLVHVITHKGTGYAPAERHPARFHGTEPFDIETGLPKHPRTKANYTDVFSTVMRKLGDRDERVVAITAAMTDGTGLKRFHNMFPERFFDVGIAEQHAVTFAAGLAAGGLKPIFAVYSSFLQRAYDQILHDVCIQNLPVVFAIDRAGLVGSDGETHQGIFDISYLSTIPNMTIMAPKNKWELSDMIKYAVDFSAPIAIRYPRGEAYDGLREYRAPIACGKSEWIYRSGQIALFALGAMVKTAEAVHERLKALGYESSLINARFAKPLDEDALLSAARHHDLIVTMEENVISGGMGEQVMRFYEEHNLSVRVLAIAIPDEYVEHGNVEILRREVGIDAETITERTIEAYEELHAQESGAERNDFMDFKTEMAERTAQIEQIIKKYLPKEEGYQKTIMEAMNYSVLAGGKRLRPMLMQETYRLFGGRSEVIEPFMAAIEMIHTYSLVHDDLPAMDNDEYRRGKKTTHAVYGEAMGILAGDALLNYAYETAARAFAMEPGNPGVCQAFQILTAKAGIYGMVGGQTVDVESEGKPDMTKEKLDFIYRLKTSALIEGAMLAGAVLAGATQGEQKIIEQTAGEVGLAFQIQDDILDVTSTMEVLGKPIGSDEKNHKITYVTYEGIEKAKADVASLSEQAIARMDSLVVKNEYLTELLRYLILREKMDNQNEKKPTLEEAFTRIEAILTQMEQPEISLEESFSLYQQGVLQLKNCGTILDEVEKKMQILGEDGEIEEMMRKNIYSVGQVNTYIQNMFAQDFMLHQISIKGEVSNCKYHSSGHIYFTLKDQTGTIAAVMFSRYRRGLAFQMKEGDKVVVTGSVEVYERDGKYQLYAREIELEGAGNLYLKFEALKRELEEMGMFDAAYKKPIPRYATRIGIVTAPTGAAIQDIRNIAARRNPYVQLILYPALVQGDGAAASIVRGIHALDVLGVDVIIVGRGGGSIEDLWAFNEEEVARAIFACNTPVISAVGHQTDTTISDYVADLRAPTPSAAAELAVFDVQLVEKWLMDYGTQMRRQLELKLNQMRTRLMHDEEKLRYLNPRAKLKENERRLDELGAALERRMQATLEQKRHTLALLSGRLDGMSPLKKLAQGYSYVEDAGGHALTDADTVQIGEALSIHLYRGSLKAAVTEIRKQDAAEDGLEKGRIDGMTRRELREQIFKLLFGVEFHDRQELPEQIAVYEETEEPWDAKDGAYISGKCEDIVAHLAEIDEAIDAVAEGWKTGRMGKVDLTLIRLAVYEMKYDEDVPVGVAINEAVELAKKYGTDESPAFINGVLAKLVMGEDRKTFKIKDGNLGEVKIADEVVAIIAGLAATEVEGVGSMAGNITNELVSKLGMKNLSKGIRVEVLDGKVSVDVALNISYGYSIPEVSAKVQDRVKNAIENMTGLEVSIVNIRIASVDMGSNKMADTMKMEYKIFLEAEDVSQSRILSCASYMKRVLESCNNLYISRAELDDESDLDDFVLRLFVEEEIEEKECTNPAMAESFIEDMAELVTGIAEAHSFLDLEGSFSVTWKGTTSAYAFVSPGGDDGCDFQELGVTEMPIRIQSDLPAKEILEKENIFVMDENRAMHQDIRPIKIGILNLMPLKEETELQLLRSLSNTPLQVDVTFVAVSSHESKNTSMSHLNKFYESFADIKRRYFDGLIITGAPVEQMEYEDVDYWEEICQIFEWTKSHVTSTLHLCWGAQAGMYYHYGLKKYLLPQKKFGVYEHRVMNRKVPLVRGFDDCFMAPHSRHTEVRTEDIRKVKELTILAESEEAGVFLAIADEGRRIFVMGHPEYDRYTLDKEYKRDKEKGLPIEPPVNYYPDDDDTKKPNLQWRSHGNILYSNWLNYYVYQQTPYEFIDTAEIIGKMTPEEQIKNLREQIAYHSDRYYNQDNPEISDYEFDQLMLELKRLEREHPELVTPDSPTQKVGGTAKRTAGVLVRHNVPMLSLQDVFSKEEIYDFVAQMKEQLDDPEFVVEYKIDGLSMTLRYENGELALAETRGDGINFGEDVTANAKVIGDVKKKLREAPEYLEIRGEVYMKNADFDAVNEKQELLGKKPFANPRNCAAGTLRQLDSAITKERKLSLFIFNIQQVRGMQFDTHTQGYEYLKKQGIHVIDDYRVCKTADEVWEAITAIGENRGNLGYDIDGAVVKINRFSDREKLGATSKVPRWAIAYKYPPEEKETKLLDIELSVGRTGRITPTAVFEPIRLCGTSVSRATLHNQDFIDDLDVGIGDTIVVYKSGEIIPKVKEVRKEKRPEGWKRFVIPDVCPVCGAKTERERDTADIKCTSPNCPAQLERHIINFVGRDAMDIKGFGTVYIEELVRMGYIKNVADIFSLKEHREELIAQGIIGKEKNTDKLLEAIEKAKQNDAYKLLTGLGIPNVGKAAAKAIMKHFKTMERLSEASEEELTAVGDIGKVSADCIRSYFSDEKNQVVLQRLAQAGVNMTAEESETVDSVISGKTLVVTGTLPTLGRKEAQTLIERYGGKVSGSVSKKTDYVLAGESAGSKLTKAQELGIRVISEDELYDMLQIERMDEQGVRINKYLSEAGVCSRREADRQIEAGAVTVDGVCARPGTRVLPGQTVCFQGRSVSQEEERILLAFHKPAGIVCTAEKREKNNVIDYIHYPKRIYPVGRLDKDSEGLLLLTNQGDLVNKIMRAGNMHEKEYLVTVNKPLTESFLRGMAGGVPLVELNATTRRCFVERIGKREFRIILTQGLNRQIRRMCEYFGYRVEKLVRVRIMNIELGSLKSGTYRNVTEEEYHELLRLTADSSSDPVMPAKKTGEKKRMENSSLNHTENHKTEEKETKRTPIKQRKKENEVLRFIREHIRYFAAGALVVVLILVLAMCAKPKGSDSDVVVNANATESTQATEEAYQVDANENINALITQYYTAYAAGDVTTLSSIATPISANEQSYIGLFSQYVDEYQNIKCYTKTGLDANSYLVSVSMEIKFTGVDTTAPGLDFFYVRTNDDGTLYIDNLYSQYNLANQENALDTSVQSLIGQFESESDVVELQSEVQTRYDEALAADENLANMIQTTIPAAIKDWVSQVAAQAATEQTEATEAAEQPETEQPQETEQQEETVQQTETLATKDRVNVRAAADTESEKLGTLDQGTVVTRTAVDGDWSVIDYNGTTGYVKNEFLTYDLPDTTAENNSDSSSDNSDSTNSASIAEGTVIMLENTTNIRSGMSEDSSKVGTAYAGEKVTVVMSYAEGWTKVKWNGETGYIKTSLLQMKIRIYVMTHKKFEMPQSPLFRPLHVGRACGEDLGYPGDDTGENISDKNCYYSELTGLYWVWKNCHDVDYVGTCHYRRYLLGADERILMEDDYEKLLSEYDLITTKQVALNNSYYYGFCANHNKKALDAAGEVIKERYPAYYPAFERLVHGTRTYFGNMFVTSKELYDSYCSWLFSIFAEVEKRICLETGEDAYHKRVFGFISEFLLLVWVTVQGLSVCECKVGMIGEKAETREMKEQLAGYFARRDVDGAKAYFLERRKERPDVLMEASDVTGELRLCMQVIATAGMEQTRYGTNLLERENRFKELMQMFDRLDQIVYRYRNGLQKKEDAVFLKEQGITDTALLIALRIPGDDAARQKELFAQITADKKALDGTTADTVTVMPQPLIYHIDVNSAFLSWEAAELLRQDPDAPDIRSFPSVIGGSEKTRHGIVLAKSPSAAALGVCTGEPLAQARRKCPDLKIYAPHYSIYVERSRQFMALLKEYAPSVDTYSIDEAFCDMTGTSSLYGNPVDFAHRLKDEIHTRLGFTVNIGISSNRLLAKTASDFEKPDKVHTLFPSEMEEKFWPLPIEDLFFVGKSTALRLRSLGITTIGQLAKSDHAMILSVFKSHGDTIWNYANGIESTPLSHNDAASKGFGNSLTLQYDVTDTAVAKHVLLSLCETVGARIRAAGAYVSVVQVQIVDNDFRHTSRQVTLASSTNVTEKLYTCACELFDELWDHRPIRLLGVSTGKATQEHYEQYDLFDMQKNEKLSRLNVAVDAIRSRYGEDSIKRACFIEADDAAPALSHMTGGMQRAKRNAAHPADAASDPARPRNRQPMSNGNETAKGMGRRRGPMGGRGMTPGEKPKDLKGAIGKLASYIRHFKFAIVIVAVFAACSTVFSVIGPKILGKATTALSEGLMAKIRGTGGIDFTYIGKILLFVLGLYLLSALFSFVQGWIMTGVTQKICYQLRKEISEKINRMPMKYFESRTYGEVLSRITNDVDTLGQGLNQSITTIITSVATLIGVFIMMLSISPLMTLIALVILPVSAGLISFVVKKSQKYFKNQQEYLGHINGQVEEIYGGHLVIKAFNREQDTIEEFDATNQKLYESAWKSQFLSGMMQPIMMFVGNLGYAAVALSGGLLAIRGTITIGDIQAFIQYVKSFTQPIQQIAQVINQVQSMAAASERVFEFLNEEEEDQSVENPCDISKVTGAVSFEHVHFGYQPDQTIIHDFSVNVAPGQKIAIVGPTGAGKTTMVKLLMRFYDVNSGAICLDGHDVRSFNRRDLREAFGMVLQDTWLFQGTIMENIRYGRLDATDEEVIAAAKAAHADHFIRTLPGGYQMELNEDASNVSQGQKQLLTIARAILADNKILILDEATSSVDTRTEVAIQKAMDHLMKGRTSFVIAHRLSTIRDADMILVMKDGDIVEQGRHEELLKKQGFYANLYNSQFEETVAMGKIFKNMIPYWKPLILVLLLLFVQAWCDLSLPAYTSDIIDVGIQNQGIKHILPEALTPEEYEKAELLMTDEETASWEESYALNGSVYERNVTGEERLEELDDTFLVPLLMNYQMSAMEESTFKKLMAEQMHTDESALDGMTIEQIGASMGVELKTFEKETQNEDGNTTTVTCVDMRDLLQAMVSGGMLEKDQLLSMRGELNSMLDAMGSSLVKSMGVAYAAGCDAAAGVDVEAIQKSYLWKAGLKMVGMALIMGIATVLVGFIGARIGAGIGRDLRGKIFKRVVSFSNAEMDRFSTASLITRSTNDIQQIQMTCAILIRMVAYAPILGIGGILKVLQTGAGMGWIIVLAVLVILGYVMVLMAVAMPRFKLMQKLVDRINLVAREILTGLSVIRAFGREKKEEQRFDDANRDLTKTMLFTNRVMTFMMPGMMMIMNVLTVGIVWFGAHKIDQGTMQVGSMTAFITYAMMIVMAFLMLAAMSIMLPRAAVAAERIDEVIRTQSSIAEPMQPEKIKEHRGVICFSHVNFRYPNAQEDVLSDIDFVAEPGKTTAIIGSTGCGKSTLVNLIPRLYDVTGGSITMDGIDIRKLAMAELREEIGFVPQKGVLFSGTIASNLRFGKDDATDEQIREAAEIAQASDFIAEKKEGYDSAIAQGGSNVSGGQKQRLAIARAIAKQPQVFIFDDSFSALDLKTDAALRRALAKKVADKTVIIVAQRISTILHADQILVLNDGRIVGKGTHEELLRGCETYREIARSQMSAKELGMEEQEVSVNEMEELYAGLFRAMNRFGKLRIGELFSDMTKSDGMMLWAISQLNQEKNNGRATVSELAEKLHTQNSAVSRTLKNLEDHGWICRMTDPKDRRNTCVALTESGEDMQQNMTCTMQEFGRAVISQMDEQDLKKLIVCLDELYDIAAEEIEKRSMRNRKEGQHGKDFMKPLEIKHRVIGGGEPLICVPVVEQDAQSVIREITYLSQGTADMIEWRVDAFRDFTDYNAIRSVFEAVAPLLGEKLFLYTFRTAHQGGMAQVKAEQLDDLHDLAAESGCVDLVDLEFFEEDRPLHKIKRLREMGVSVIASHHDFEQTPSPEVMKMLLEKMCAGGADIVKLAVMPQNYKDVLNLLDVTAQFREENPDTPVITMSMGSLGGISRISGETFGSCVTFGAHEKPSAPGQFAMKELRQMLDTIHASSQIQMSFSLSTQCHMSFTFLNELPSPAEIKQNYPLSDKLKALKKERDAAISAVITGADSRFLVIIGPCSADNEDSVCDYVSRLTSIQEDVADKLILIPRVYTNKPRTTGEGYKGIASQPDPEKAPDMIEGLIAMRKMHIRAIEESGLTCADEMLYPENWGYVEDLLSYVAIGARSVEDQQHRLTVSGFDVASGMKNPTSGDFSVMLNSVYAAQHPHHFVYRGYEVETTGNPLTHVVLRGAVSKHGNTTQNYHYEDLIRLCEMYQEMDLVNPAAVVDVNHSNSGKKFKEQIRIVKEVMHNRQVSSDIEHMVKGVMIESYIEEGNQKIGDHIYGKSITDPCLGWEDSRDLIYTIADMCRMTQDIQNFIQYLHQEKNTSENTEVSYARDLKKMNQYLLAQGICDVNEVTATSLTSYVIYLEKEGRKPATISRSIASMKAFYHYMEKERRLAVDPSERLKAPRIEKKMPTVLTTEEVTRLLEQPGGTSPKELRDKAMLELLYATGIRVSELISLRVSDVNLRMEYLTCSDGHKERIIPFGMIARKALEAYLAEGRPKLISDEKEDRLFTNCSGQPMSRQGFWKLMKGYGKKAGIEAEITPHMLRHSFAAHMVGNGADLKSVQEMLGHSDISTTQIYAQAKDLQMREVYLKAHPRGMKREGCIVMLAFLGGIVLTNLLGANRQIHGQLLNQTFLQQYAYQKVDGNQLFGHVVMVRMQMLVLIFLLGRAVDGKVFSVLAKSMLSAGFGFLLVVGIMEYGGYGCLIILAGLLPQWIFYTAALLFYANSKKRQSRIVGWNSWQDRTRQLAEAGLVTGCVLLGTFVESFVNPAVFAWVLKIFCMDQQVKRVKRELIKHGAILDMYEDTMELPDGKQETWDFISHRKGAAAVVPVRGDGKILMVKQYRNAIDRMTLEIPAGSRDSVTEDTRVCAARELEEETGYCSDDLTRILSLKTTVAFCDEFIDVYLAKNLKPGHQHLDEGEFIDVAAYGVDELCDMIYAGTIQDAKTVAGILAYKNLLNQDMETVIAVVVAIAVTAIVVYFVTSAYHKKVTEAKIGNAEEKAREIIDEAVKTAETKKREAMLEAKEESIRVKNDLDKEVKERRAEIQRSERRVVQKEENLDKKLESIERREAGFAAKEEEINKQKAQVAKLNEERLQELERISGLTSEQAKEYLLKTVEEDVKLDTAKLIKEMEHRAKEEADKKAKEYVVTAIQKCAADHVAETTISVVQLPNDEMKGRIIGREGRNIRTLETLTGVDLIIDDTPEAVILSGFDPIRREVARIALEKLIVDGRIHPARIEEMVEKAQKEVETMIREEGEAATLEVGVHGIHPELVRLLGRMKFRTSYGQNALKHSIEVAQLSGLLAAEIGVDVRTAKRAGLLHDIGKSVDHDMEGSHIQIGVDLCRKYKESPIIINAVEAHHGDVEPESLIACIVQAADTISAARPGARRETLETYSNRLKQLEDISNGFKGVEKSFAIQAGREIRVMVVPEQVSDADMVLMARDISKKIEAEMEYPGQIKVNVIRESRVTDYAKMQEVQVKEVARREKGRVFFRFDNGTEFTLYRSEIRGLPQAESMLLMTEDAYLPVSLYEKILTEIVGKRAKKRALFLLERMDRTESQLCEKLRQNGYPEECVAAAVEYVKQYHYIDDLRYAKQYIRYHQQKKSSQRLKMDLMKKGVGREQIEQALAEEFVSDERAQIAELLEKRHYDAAQADRREQQRMYQFLMRRGFKSSDILAVMREEHFFDEFMAKDDKLTRDERPTTKEEKLKALDAAISHIEKQYGKGSVMKLGDNSAHMNVEAVPTGSLSLDLALGIGGLPKGRIIEIYGPESSGKTTVALHAVAEVQKRGGIAGFIDAEHALDPVYAKNIGVDIDNLYISQPDCGEQALEIAETMVRSGAVDIVIVDSVAALVPKAEIDGDMGDSHVGLQARLMSQALRKLTSIVSKSNCIVIFINQLREKIGVMFGNPETTTGGRALKFYSSVRLDVRRVEALKQGGEVVGNHTRVKIVKNKVAPPFKEAEFDIMFGQGISKEGDILDLAADAGIINKSGAWYAYNGEKIGQGRENAKNYLKENPLICEEVEAKVRAKYSPEEDEAAEQPDEKSAGKTTGRTPEELPAEMEKLLFFGLTDAEFQKIKPVASRLKLHCEQIPVSMYHNTLGAIASGRAVPAGIPAAPGTPVPASLTAALGADAPAGASAVSAACGIPEAGSTPAAVSRHRLLVMCQLPERRMDKLLFELRRIDAPIDYKAVLTPTNAGWTIPRLLMEMHSEKAAYTAKNRMISNIIRIPENKKFQNKQTAAKSLKQNSRISSMPRLASHSVSLPRLNTPGVCPTNRRQMAMELKFVAPKMEETFGKLTFAGVGDAETAYMNGRTRVTGRSYHLFSTRQRADDVVVTLPATVGEKHFGYDEPVVLINARLSASGRNIEGSGYTDYKMTADDMVTPEEAAKLAQAGKQMRLKEGIVVDEVKTFGNLKFSGLRREVYERDEEGNSTGVLIKMQEGKKQRIEFLDYLKAVCVIMVIITHYGWEDKTSPFFTMLINMAVPVFMIVSGYNFAMSNRKKADGNLEKMYGWNMMKPKLIRFLLPFFAICLLEILLLAAQDKNIPLFRIFVLGAYGPGSYYVPIMLQLLVIFPLIYVMIAYNAKLGLAVAALANLAFEVCVIVFDMDKYYYRLSIGRYLLLIAFGCYLYLHPEQRVKPYQMWMMFLAGLAYLIAVFGFDKDFELFGYWKTTAMPVAFYIFPIVILLFRKFYHCTIPGFAGRLLTQIGKASYHIFLIQMVYYHFELGGAIMQTAWYIAVPFNILVTVPLGLGFYELDNQFVKKLREVKHYIRAVVMNKQSEKPRGLLSGKTVLLCVTGGIAAYKMPNVARMLKKLGCNVHVLMTQNATNFITATTFETLTANKCLIDTFDRNFEFSVEHVALAKQADLVLIAPATANVIGKIANGIADDMLTTTVMACTCKCLIAPAMNHNMYHNPIVQDNIRKLEHYGYEMIEPVRGMLANGDTGDGKLPSEEELAEYVLRELAAPKDMAGLKILVTAGPTQEAIDPVRYITNHSTGKMGYAIARRAMYRGADVTLVTGPTACEPPRFVNVVPVVTAAQMYDAVMSRAKEQDIIVKAAAVADYRPASVAEEKIKKSDREASIELERTQDILAALGADKGKTILCGFSMETEHMLENSRKKLRKKNVDLIAANNLKVEGAGFGTDTNVLTLITEDGERELARMSKEEAADELLTELLIISKGRAKGQMTTVKVQKNQIIAKQKEKVKKWYIVQEGTVIQCNSYAKIVLGKNAVIGISEGDRYLCDYVATEDSVLAVFNCESAEDLKEAIHGQESMRSILLRAALGQRQMLLRTYAGFTNLVRQFHSFAENEYSQYENLCAQYHLDEQSFTRMDNFKPLEMVHRAENWEIGNSASLTGSYLEEYVHLMQRDDNLCIGAIMEASYQTRRVTQGIIEMVEYLRYNQDILLAESKNDLFNLFFALAIQAHKKNYDVKPLLNEMDRIAEVIKKLGIYSGKLVDMRMEEYRGYHFETEGAAYETPQAQDGEEEETQEERSEDCLVHILTYADTEQSVIEEMQELVQKYRDLPDMFSTDAQTFAIRKRITQIFYDTYLKAFMHTVKGEKELTPIVEMFLNFGFMDVQMAGEENANILFDLTEHLDVCKSDHVYTIFEWLRSVYDGRNEPSKNEFDMDYPAYLAEMRKTGKITTEQQKHFMSNRELKVKFEIQNMFTSGNRATYGKLSTFCPILGEYDLINSIEKMLVTAQKLDESLHKIRDIDFSAFYREVQFSDPDKGINREMIMKEIMPDIILMPNAGTRSMMWQETAGVRRDTSARFLFPIFTAVDIDDMMVDTVGRYRWEICRKIQGVHWNDIREKSLTAEYCDYLQFYRKNRELSTEAKEKIKSALLRGRNNYREVFVKDYQNWMKYESKGSYRLNKIAREILITYCPFAKPIREELKGNPMYESALHRLDLLNAKTVQRIQGVYDKYQKAGGRITQELTDNLEYYELMAKNESTQNSTSNCRDGYENSYENNAGSGSNSAKNKSTNKSTNKTSNVSGSNKTSDKYQQMTFYTIHPRELEDIMRRKHGILIDVREADSYREYHYPNARNLPYEKIDQWMHRLPKNRPLVLYCDYGSTSLLAARKLGREGYEVYTVVGGIEAMRTSDMKTYELVVPCHFGLEAVLKREIYDLGYEISRVEDGRVSFQGDAEAVCRANIFLRTAERVLIEVGRFRATTFEELFQGIKALPWEDYIPVNGKFWVKKASSIKSKLFSSSDIQSIAKKAMVERMKQYYDVEWFAEDGAPYPVRIFLLKDEVMVTLDTSGDSLHKRGYRTLTSKAPLTETLAASLLLLTPWRPDRILVDPFCGSGTFPIEAAMIAAGIAPGMNREFTAEQWTNLIDRKLWYECVKEAEEMIHTDVKVDIQGYDIDGDVIKAARENAKRAGVDHLIHFQQRPVAELHHPKKYGFIVTNPPYGERLEDKADLPKLYGEIGAAFRGLDSWSMYLITSYDEAERYIGRKADKNRKIYNGMLRTYFYQFMGPKPPRRSVRDTAGGDEMKYSKRYIVFGVLVAAMLIFKLELGASGSGTVENFRGANLQATTWNPLIASSVNDNLLSLVIDNKEYTNENHTFYMDDQLNIMVPVNILRDALNCSAHVYDGKRLLVEKHANEVEFSLGASEAKVNGTREVIVSPFIRKDDTYYVSLNDLANYLDYSYSWDIQENQASAMDTSDSATIIPTRYDLREKGRAAAVRNQGTFGTCWAFAALGALESSLLPEEKLQFSVDHMTMNNGFTLTQDDGGEYTMGMAYLAAWEGPVYEADDPYGDNKTNPDLTAVKHVQEMQIIDGKDYEKIKESVFLYGGVQTSIYNGLRSSQSKSPYYNQKTNSYCYIGTEKPNHDVVIIGWDDSYSKENFNVDLEGDGAFICQNSWGDTFGEDGVFYISYYDTNIGTHNVVYTKIEEPGNYDHIYQSDLCGWVGQLGYNKDSAYGANVYTTSQEEELVAAGFYATGKDSQYELYVVRNFENADSLTQRIPVASGKLSNAGYYTVDFNQAISLDAGERYAIVLHMITPGSVHPMAIEYAADEATANVILDDGESYISTNGARWDSVDTVEECNLCIKAFSKNRMEEKALRLSAVFLMILTAVSFVLLPKLPALHTWEVEAREERIAEEEFAQSQVTMQNLKIKEQNEAAGAKGELSIRLPEGVTGDQIAVSNDYVTQTIRVEIPQADRTYFDSYPVLGNSDYIDGLSYTRQGETGVIEVTTNKVYELQTEYDAQNFYFNFLTPHEVYDKVVVIDAGHGGRAVGANKQGINEKDIDLAIVLKLKEIFDNSDQNIGVYYTRTDDSNPTFDQRVQLANKSDADLFISIHNNSTRSGRMSGTSGTQVMYDETSEASRQFAQICLEEVTGRIGSRDKGLVEGDSIYIIRTSEVPVALIEVGFMTNKDELEKLNSDAYQRETAEGVYQAVLRAFEEGYMRIIFATGNAGKMREIREIMADMDMEICSMKEAGISLDIEENGTTFEENAQIKAKAVAACTKDIVLADDSGLEVDYLNKEPGVYSARYLGEDTSYDIKNQAILDRLKGVPKEQRTARFVCAIAAVLPDGKTLVTRETIEGYIGECPAGENGFGYDPIFYVDEYHCSTAELTEEQKNEISHRGKALRSMKKLLHEYGFMKILVVSDTHRKLENLKVILEREQPMDLLIHLGDAEGDEDSIAEMAGCRLEIVAGNNDFFSNLPREKELRIGSYRVLITHGHYYYVSAGIADIEREAAAQGYDIVMFGHTHRPVIDYTRDVIALNPGSLSYPRQEGRRPSYIVMDLDKNGKANFEIKYLMKKFVALFTDSYRELKSVRTITTMAMLAAIAIILGMFSIEYGNFIRIGFSSIPNGIIAYLFGPTVGGIFSGTLDIIKYILKPTGPFCPQLTLVTMLAGVMYGCMYYKKKLTLPRVLATKFIVMLVCNVFLNTLCLTVLYGQAFMVILPARALKNLIMWPIDSVIFFATAKALESIGAFRFVRRAQAERIARSMKSRRIPLESEVDKYEVGKGMEDGFELFSDVVTKGWIVTDSLVKIERPDGTIVCPYIKHRRGRTFIGEGDYIIVQQDGTKNVCGADKVWTRYEKPEAMIQNDDILNMNFYKKEKFTGSYQGMRYLIQKDQEEDAEDENVKHDIFRVTIWPGPYNFASTADDLKSSAVFPFTPEGKEQVVGWLNEQWSARRTEWPGRMGKYIVKRVLLAIISILIVSAITFFVMNIIPGGPFNKEKATSAEAQKVLEERYNLDKPIPEQYVIYMNNLLHGDWGVSLHSGRDIWGEISSRFKVSAKLGGMAALVAIVAGLVLGSIAALTRNHWPDRLIVFFTTLGTAMPSFVLATLLLLVFCLKLGWFPVWSSTSPNYVLPIIALSVYPMAYITRLTKTSMLDSLNQDYIRTARAKGVPGWKVIFKHALRNALIPVITYVGPMVAYILTGSMVVENIFTIGGLGSSFVTSITNRDYTMIMATTIFLAILMVVANLLTDIAYKFVDPRITFEMELKHRQILSAQVDLSKFNKANFEKATDEEKKQQDVMGESTTFFKDGMRRLRKNPLAMGSIIVLVLILLTIIIAPHICPYKYSEIISVNGVRDKSAANLGPFEYSKLEAKYMNETGEKLFPHIFGTDSLSRDYFIRVIYGTRVSLSVGVVASIMVLIIGLLYGSIAGYFGGKVDLIMMRIVDIIYSLPDMLIIILLSVVFNETLKPLITGTVLEKLGTNMISMFIVFGLLYWVSMARLIRGQILSIKNNEYVLAARCIGTKNARILRRHILPNCLSVIIITTALQVPSAIFTESYLSFLGLGVSAPLTSLGSLANDARAGMQSYPLRLVIPAIAICLIVLALNLLGDGLRDAFDSKLNMSEENKYILEVKDLHTSFFTDAGEVKAVNGISFNLEPGKTLGIVGESGSGKSVTAYSIMQILAETGKITGGEVRFHGEDITKWNSKQMQKFRGEKCSIIFQDPMTSLNPVFTVGSQLIEAILLHTDKNKKEAWARAVEMLTLVGVNEPESRMKQYPHELSGGMRQRVMIAMALVCEPDILIADEPTTALDVTIQAQILELMQDLQKKLGMAIIMVTHDLGVIASMCDEILVMYGGRVCERGTADDIFYRPAHEYTKGLLRSIPKADNMNEKLVPIGGTPINLLQMPAGCAFCPRCDAAMKICLSEKPEELRISDTHLASCWMNIKELYEAQEEAEMSEEKNLLEVSHLKQYFPVHQGFKTIPLKAVDDISFAIKPGETLGLVGESGCGKTTVGRTLLRLYQPTAGRIVFDGKVLFDSGEQYDENGKLIVDANGKPVLGKKVDVDMLPYRRQMQMVFQDPYSSLNPRMTVEDIIGEPLDVHKLYANKKERREKILNLMELVGLNAEHAMRYAHEFSGGQRQRIGIARALAVNPKFIVCDEPVSALDVSIQAQVVNMFEELQDKLGVAYLFIAHDLLVVHHISDRIAVMYLGKMMEIADADELNGNPMHPYTLSLLSAVPIPDPETARHSKRIVLEGDVPSPLKMPTGCPFRTRCKYATEQCAKEMPPLSDRGSGHFVACWNKMKKLVASLLVASMALGLTACGGSSDSTASTGESTGTAAAGTEAAATAEATTTNAETNVLNINLASEPDYLDPALNSSVDGGCLAVNSFAGLYTYDKDGNLIPALATDMPEVSEDGTEYTVHMIESKWSNGDDLKASDFVYSWNRVIDEKTAADYAYLFDVIDRNDDGTLAVETPDDYTLVIKLVSPCPYFNDLLAFPTFYPVHQASVEAADTDGTVPGKWAQEAGFVCNGAYTLESWNHNESMVYVKNPNFYDAANVTMDELHFMLSADDTAIYAAYNSGDLDYIDTVPNDEIPSLNGVNPEFGILDNLGTYYIGFNVNDPVFDGKTEEEAAKMREAISLLVDRQFIVENVGQTGQIPADSFVPEGMADGNGGVFKTADTSYYDATATGAGELETAKGLLEEAGYTFTDNGDGTYAVDPAISMTYLTNDGTAHIAVAESVQQDVALLGINLEIKSEDWNVFLEDRKSGNFTIAREGWLADYNDPVNMLEIFTSDSGNNDMQLGKGTPVSSSPDWTAYDELISQIRTTTDFAARVDLMHQAEDMLMDTWAVVPIYYYNDIYMQKSNVTGIYATIFGMKYFMYATKTAMTAGDAYLYRKEKSRNGEKYPFRDFLRGKTGEEKTAYLVIMIKNPYQKDYQNELKQNRHGLLVTRTSYQGDFYVLPFDEQQKRRTGILNVIWTIALWVIELGMGLINPDSSRTAWIVFPYLFVILPLGYMLYGAVSYIGAPLRMHRAHYETGLLRMKRSCIGAMVLTGIGAVLDLVYMVLHRGEIRMGMECIYLICHFLFLAVAFFFGKYYDRNYSGVLIENATMEMKKMRQTLALLLAGALTVGSFAGCGGSKAGGETAGTETAGTEAAGTAASGSDTPLVIANDGMSEKFSPFFAESVPDQNIVDVTQISLVYNDRSGEFIYNGIEGETTSYNGTDYTYYGPTDLTITENEDGTVYYDFKLRDDLTFSDGEPVTADDIIFSFYVFCDPTYDGGASVYSLPIEGMEEYRSGMSTLASLLAAAGEDNTDFTYWTEDQQNAFWDAVNDGGAAFAQEIVDYCVENGVSEEGDVAGAAAQWGFDGLAADATAKDFFMAIGDKYGWSFTAMEAESAGSALSDLIPEDVYAYATEGVETGDAAANISGIQKLDDKTVRVVLTEVSAPALQTMDIQITPLHYYGDESQYDYDNNQFGFTKGDLSAIREKTTAPLGAGPYVFKSYENKTVYLEANESYYKGAPATKELQFKETAEADKLPGVVQGTVDISDPSISKEVMAQICSENSNGEVSGDVLTTALYDNNGYGYIGINSQNVKVGDDPSSEQSKDLRKAIATVISVYRDMVIDSYYGEAAAVINYPISNTSWAAPQKSDADYEVAFSKDVDGNPIYTDGMSDDEKYAAALDAALGFFEAAGYTVTDGKLTAAPAGAKLSYEVMIGGGGKGDHPSFGILTAASEALKTIGFDLTINDLADGTIMWDALNSETAEMWCAAWQATLDPDMFQIYHSEGGSANYYAIYSDELDELVMEGRTNTDQAFRKAVYKEALDFIVDYAVEIPVYQRQNASVFSTQRVNVDSIPQDLTTFYSYLNEIEKIQMNMKKFVVKRVLLSIVILFFVSMIIYAIMRCMPSSFVEQQALTLSQRPGAKSYDEWVAQLNASYGLDTGVIQGYFRWAAKAIRGQFGDSWYFNQPVLTKFASVIWYSFALSLASFVLEIIIAIPAGIAAARKQYSATDYTITVIALVGISLPSFFVATLLKWVFSVKLGWFDLYGIVGRNFQSLSSGRQILDMAWHLVLPVITLTIVSIGSLMRYTRTNMLEVLNADYIRTARAKGLPEKRVIHYHAFRNILIPIITLLGGTLPGLFSGAMVTETLFQIPGIGYTSYQAVLQGDIPFVMFYMLFSAVLILLGNLIADILYAVVDPRVRVNMENEKNNMKLDDAQRVRVLSPGMMVAKRFFRNRLAIVGLVIIVCMFLFAFVGGAVNPYSQSEVFYRTEEMKKDYAGAAKIDEFQVFVADGVELPSDVYSKMILAVTKNALVFETRDGQTLALGRIDDDTYHIYAAEQQMNPLALKSEEHDAAEAAGQNQFTYNGVEYVFDASGVKETLYTTTELGIACRKSVTAFDEGTTFSYDFYSKVLTAIANGDKNIEADGVNYTVENEGSAAMIHTADGADYAYVSDMSMNPVASGIVLTPAFKEAAEAAMTAGEDSFEYTDEQGETDTYLIKDKNGQYTIQRYQETRVIDSYAAPSVKHWCGTDGNGMDLLARLMYGGRISLMIGFVVVIIELIIGIIVGGIAGFFGGWVDTLLMRVVDVVYCIPAIPLYLILGSIMDYYKASAKTRIYMLCIVMSIIGWVSIARIIRGQILSLREQEFMTAAEATGIRVSRRIFRHLIPNVIPQLVVFASMGIGDVILAESTLSFLGLGIKYPAASWGSIINAVNDSYVMTNYLFVWVPAGVLILLTVLAYNFIGDGLRDAFDPKMKRMAFNNKKKNANYISAKESRAIARENRKITQEIEKKRNRKHIPEEEYVTKMKNPENCVEFDNVQTYFFTDIGTVKSVDGVSFDVPQGKTVGIVGESGCGKSVTSLSLMQLVQRPSGQTVGGEIRFNTGDHVYNVVNTPTSVMQKLRGNYMSMIFQEPMTSLNPVLRIGEQVDEVIALHNPDMTKDDVKTRTIQMLEMVGIANKEGVYRMYPHELSGGMRQRIMIAMALACNPRLIIADEPTTALDVTIQAQILDLLRGLKDKINSSIMLITHDLGVVAEMADYVVVMYAGRVVEKGTAREIFKDPRHPYTIGLMKSKPVVGKYTEKLYSIPGSVPNPIDMPDYCYFKDRCEMCVDGCEGAYPGMYQISPTHFVSCYRCAAEAVGKEGDTKNEQMSNNESTKTINQSDNILEVSHLKKYFPIKGGFFGGATGSVKAVDDVSFNIKRGTTMGLVGESGCGKSTTGRTILRLIEKTDGEILFNGEDISKYDKKQLRDLRTKMQIIFQDPYSSLSPRLPIGEIIGEAVREHGLVPKEQFDDYVTKVMKDCGLQEYHKDRYPHEFSGGQRQRICIARALALNPEFIVCDEPVSALDVSIQAQIINLLRDLQKERGLTYLFISHDLSVVEHISDTVGVMYLGGMVESGETADIFGNPLHPYTKALFSAIPMPDPDVRKERILLKGDIPSPANPPAGCKFHTRCSECMEICKHEEPQVKDVGNGHKVKCHLYDEKMLFDRAAKGKKSKELKGELKDLKKSLLNAGGEKAYVNEALRDYQAALEQGDTLREQYEEARRHLAQSRAAIERLLECMKESPVSEVKKSLDELMGDLDQVYHDCSIRDDDLDFQSTIQSLKQMAAEYEEHAAKAQTEAGSKLAAIMLRSELENVAAVLKDATGWEEPDFFALAYYLGHENRGSLREMENAQRNSYLVDYCGERFWNRFLELCRRAEAEQMVRFMTRKYIYNTEESPSNSMKKALSVLLTAAMAASMMAGCGSSSDGAASGTTTDNGAAAGTESAGAAAADGAAFKIGGIGPTTGAAAIYGTAVMNGAQIAVDEINAAGGINGYQIAYKFEDDQHDAEKSVNAYNSLKDWGMQMLMGTVTTTPCVAVVEKTAEDGMYELTPSASSTDVIDNDNVFQVCFTDPNQGTASAQYIGENKLAAKVAVIYDSSDVYSSGIEANFVKEAQNQGLEVVAEEAFTADSKTDFSTQLQKAQSAGAELVFLPIYYTEASIILTQADSMGYAPTFFGCDGLDGLLGVENFNTELAEGVMLLTPFAADADDEKTQSFVTKYKEAYGDTPNQFAADAYDAIYIIKAAAEQAGVTPDMSVADIGSALEAAMAEISVDGLTGDSMTWQATGEVSKAPKAVVIKAGAYSAMMNFLSYLINGISLGSVYAIIALGYTMVYGIAKMLNFAHGDVIMIGCYVVFLAMSGQGISPLPAVVLSIIVCTVLGIVVEKIAYKPLRRATPLAVLITAIGVSYFLQNAALLLFGADTKSFSSVVSLPSLKLADGALTISGTTIVTVLACVVIMIALMLFIKKTKAGQAMLAVSEDKDAAQLMGVNVNATISLTFAIGSGLAAIAGVLFCSAYPTLTPYTGSMPGIKAFTAAVFGGIGSIPGALIGGILLGIIEILGRAYISSQLSDAIVFAVLIVVLLVKPTGILGKQIHEKVMAKLNLKTVNKKTKDQLITFVLVIAVYIVVQIMVAAGAISSLMQGLLVPMCTYSIVAIGLNLCVGYLGELSIGHAGFMCVGAFSSAFCTKMLEGVIGSQIVLFIIALLVGTAMAAFFGFLIGIPVLRLRGDYLAIVTLAFGEIIKNIINVLYIAKDGSGFHFAISNGNAIDLADDGVWLINGAKGIAKIPHLSSFTAGVILILISLFVVYNLVNSRSGRAIMAIRDNRIAAESVGINITKFKLMAFTISAAIAGAGGVLYAHNLSTVTATPANFGYNMSIMILVFVVLGGMGNFRGSIIAAVLLTLLPEVLRGLSDYRMLIYSIVLIVMMLFNWAPKCIEWRQKMAQKFRKNTKKEAVMAMLEVKNLGISFGGLRAVDDFHISIEKGQLYGLIGPNGAGKTTVFNMLTGVYTPDEGTISLDGADITGKKTIDINKAGIARTFQNIRLFKDQSVLDNVKIGLHNQMSYSTLTGILRLPKYRKVEAEMDEKAMELLKVFDLEREAGFLSSNLPYGKQRKLEIARALATNPKLLLLDEPAAGMNPNETKELMETIHFVRDEFDMTILLIEHDMKLVSGICEKLTVLNFGQVLAEGATGDVLHDPQVIKAYLGEMAMLEVKNLKVHYGVIQAIKGISFEVNEGEVIALIGANGAGKTTTLQTITGMLKPSEGEILFEGQDIVKVPGHKIVSMGMAHVPEGRRVFAELSVYENLKLGAYTRKDKNEIAESLAKVYKSFPRLEERKNQLAGTLSGGEQQMLAMGRALMSKPKIILMDEPSMGLSPIFVEEIFHIIREISASGTTVLLVEQNAKKALAIANRAYVLETGNIVLSGDAKEMMNNDSIKKAYLGEMKKTVITIARSYGSGGRTLGKLLAEQLGINCYDREILRMASDASGINEALFGQADERLKRSPLFGILKKNPYKGGVIPPENSDFVSDDNLFNYQAKVIKELAAQESCVIIGRCADYLLRDDPDVIKLYFCAPKKDCVARVMNQNGLSEKEAERRIEKIDKYRAEYYRYYTGRDWNDARNYNFCLDTTSMSYEKLVEVVTNFIQIYQKMTTEWSLDELYKGFDDPAYGKDVAELTAQIDALATLLADAGRMQEKERTEKVLAAQSGIAQLFYQLSLYVELRQSVNTEDGTVMAENAKLMKLQAKIAPLEAAAGKLLAGIRDVDALAKESGLVREHTFYLKEKQKEAKHLLSDEVEEMAASMNMSGGAAWSKLQSYLTSTVKVDYQGKQITLSEVRNLAYSPEASVRKSAYEAEIAAYEKVEDAIAFSLNYIKNQVTMLSEKRGYASPLAMTLEQSRMKRETLDAMMAAIDEYLPVFRKYLRKKGGMLGHVNGLPWYDLFAPLGKADKTYSIEEAKQYLIDTFTKLTPEMADLMREAFENEWIDFYPRKGKEGGAFCAGAMWLKQSRILTNYDGYFGSVDTLAHELGHAFHNRQIENHAPLNQDYPMPVAETASTFNEVHLGKAARAEASGEELLNLLENDIKEQTQCIVDIYSRYLFETAVFEQSQNKFLMADDLKQIMLDAQKKTYGDGLDPECMHPYMWVCKGHYYSEGLSFYNFPYAFGNLFALGLYSQFEKEGEAFIGKYKAMLSATPCCTIEEAGAMMGIDLTKKDFWRTGLSEIAEEIEQFCTMMEDLKQIMPKKLGFGCMRLPVANGNSEEIDDAVFCRMIDRYMEQGFVYFDTAYPYHNQKSEEAVRRCLVERYDRERFLLADKMPVWLVQNMEDYSEIFERQLARCGVTYFDFYLFHAMNKTRVEETEKTGGFAFVQRMKTEGRIRHIGFSFHDTAEALEEILKNHPEMEFVQLQINYYDWESENVQSRKCYEVAQKYGVPVIVMEPVKGGTLANMTGRPAEILKELSPEASFASYAIRYAASLENVMLVLSGMSDEQQLIDNTAYMREFRPLDERERAAIARVVEELAAMPTIACTKCRYCVEGCPKKIPIPDVFEDYNMTVQFGINETNRGSYRRHTADGGSADVCIRCGKCEGQCPQHLPIRDLLVKVAETFAEMKKKVLSALLCAAMVVSMTACGLKAPEAADTTTSQNTDAAADATADATDSAAATEAGDSTGTEPVGPAVTLVYAEVNPLEGTIVGQTATAFKEKVEELSGGSITIDIQANGVLGAESDVLDTMLGGGGTIDMARISAFALTSYGGEKSSLLSVPFTFVSRDHFWNFATSDLAQEFLLEPHENGTGIRGLFYGEEGFRHFFTVNPIEGMDDLAGMKIRVSNDPIMTGMVEGLGANPTVVAMGELYSALMVDAAEQPIANYQANAFPEVAPNIILDGHTLGAIQVVITDEAWDSLTPEQQDVLTEAGEYASQYNRQISQETEDKILEELKADGVNVIEVDDITPWQDACKDVIEEATKNNKELYQQIVDMQMPKIFQTLDKIKPAYDVAYKFVLFVCKLLLTADIVITSVCVVGRYVSFVPDPAWSEEVVLTLMSYMAVLSAALAIRRNAHIRMTAFDAYLPKNVIKALDILADVAVFILAIVMITVGFSYATGIGAKGNYVSMPWLSKFWMYFPIPLAGVAMVVFELEAIYNHIKSIFVKEGTKMSVQSMAIAVLLVSFLVMILLRFPIAYAVALSSLLCLLSQGLPLTTICQQMVKGISSFSLMAVPFFITMGVLMGTGGISDKLIALADACVGWMTGGMAMVNIVASYFFGGISGSASADTASIGSIMIPMMVDQGYDDDFSTAVTITSSCEGLLVPPSHNMVIYAMSAGGVSVGSLFLAGYVPGALLAISLMIGSYIISKKRHYPKGDKFSVKRLLKQLGTSFWALAAVVIVVVGVVAGWFTATESAAIAVFYSLIVSVYIYKGLTWKGVWKSLEQCIDTLSIVLILISTSSIFGYCLTTLHVPDLAAKAIIGFSSNPIVIALLVDLILLILGCIMDMAPIILIATPILLPIATSIGIDPVQFGIIMVLNCGIGLLTPPVGSVLFIGSAVSGVKMERVVKATLPFYLCMIVVLLLLTFIPELSIGLPMLLGTMEYQYKCRITAWDFFRLTMRQTYRSMAGMCNLVFTVAMILLTAKFWSQSGEVLQVLMLIGCLLFPVIQPAAIYAKARRQAAAVPQDVRLTFDEKGLLVTTGGERQHLPWNRLRVTKQPGMVLVLSGAGSGYMLTNRVLGADREAFWSFVQSKVEQNRMGKTSVRKRIKQFWQALTIKKKIATFTGTVFLIIAVSVLFNVWVVKFSLIDFNRILQDNAAVSELAQALEEESIQFETYIKGNREERESLDIAIERTGRAVEKLPFRYSEIGEQRYAKTWSIKSCYEVYCQKRDAMLAMGENAPDYIKRLYEVYEMQDYLEEYAATLMNETIEDGDGLYHKKVPMLICMPIVVVVSGIILVTGMMELAALMNQTIISPVVALVKAAQRIAANDFFSEDVQVQNEDELGELVHAFNKMKYATGEYIMALEEKRKTLDLLHEEELGKLETEKRLEMIKLELLKSQINPHFLFNTLNVISGMAKLEEAETTEKMILALSSLFRYNLKTPEQSVPLAKELKVVADYMYLQQMRFGERIRYELNCKVEQELVMVPAFTFQPLVENAIIHGVSPKEEGGSIRIVVRQKEMRLHIVIGDDGIGMTEEELQQLKSRLKTDDARHSGIGLGNVYRRITAMYADGNFEIYSKKNAGTVIFIDIPCREETGDMTMKRVLIADDEPIERMIVTRTIQKYFPEELAVVSAVNGREAVEQFFAENCQIALLDIEMPGMNGLEAAEQIRERDKNCSIIFLTAFDEFNYAKRAIAVRAMEYLLKPVEDQELEAVLAEAIRIADEHTDDREAGEKKEDEPVFAERDCHEDAADTERSRIRLQAVAGNIQAFIEHNYMDDISLQTVAEAMNYSDAYFCKIFKQCFDKNFIVYLSEYRVARAKELLGDVLINVKDVSQKVGYRDSNYFAKVFKRIAGVTPTEYRTQVLKEAGERMRRICAAAAVAGMLILLTLSAWRNHTYPSKTEMEPEYVFSYAENQPEDYPTTLGAKYFAELVEERTNGRIRILVQPVGVLGSENKVIKQMQYGGIDFARVSLAQLAEYIPSLNVLQMPYLYTDSDHMWRGLDGEIGDAFLESVSADDVIGLSWYDAGARNFYNSVQPITCLEDLKGMRIRVQESDLAVDMVEALGATAIPIAYGDVYASLERQVVDGAENNWPSYEAMRHYEVAKYYTVDEHSRVPEMQICSAYTWQKLSPEDREIILECARESALYEREVWTQREEQSRSIAIENGTKVVELSAEEKKRFQNAVYGVYEKYCGDDMGLIEEILKEGSMCRRPGKMPHTDKTKKRKGDGAMEKTVKNQVWNFNDRIDAEVCAEGVERKILAYTDELMCVENHFKKGAVGALHHHPHTQITYVVSGSFEFEIDGVRRVIKPGDALLKRNDIEHGCVCLEDGILLDIFTPMRQEFVMKKLSSVILADLVASKRKEKSMTQQALAEATGINRALISRIEKQDFIPSIPQLEQLGEVLGFEPDSVFADTAHDRLSSPSPLCIAVAGTGYVGLSIATLLAQHNHVTAVDILPEKVDLINRRKSPIQDDYIEKYLAEKDLDLTATLDGAAAYRDADYVIIAAPTNYDSARNYFDTSAVEAVIELVLSVNPDAIMVIKSTIPVGYTESVRQKYHTTNIIFSPEFLRESKALYDNLYPSRIIVSTDSDDERLVVASRNFAALLQEGALKENIPTLFMGFTEAEAVKLFANTYLALRVSYFNELDTYAETKNLSTRDIIDGVCLDPRIGTHYNNPSFGYGGYCLPKDTKQLLANYNDVPQNMMSAIVESNRTRKDFIADRVLQMAGYYNYASANTYNSGMEHPVTIGVYRLTMKSNSDNFRQSSIQGVMKRIKAKGASVIIYEPTLEDGTTFFGSKVVNRLDEFKKISDSIIANRYDSCLDDVKDKVYTRDLFRRDMGGLIWIIVIVVVISEIKKFQRKNGQRVKPNVPRQQQYMRPDQTKVGQQNVRPNQMPRQQQNVRPNQMPRQQQGMRPNQMAGQQNVRPNQMAGRQNVRPNRMPGQRTQSAGGAAMAGCRRPQPNQAENDILKRATENVSENDGDELEQQMMAGAHELVNAIDIDSASELMHEVEDLMIMGYQANLPFERDFIAEGVAMLNGYELDMGAMERVRIPQSGEIYRHFKNRLYQVIAVATHSETGEKLVIYQALYGDYQVYARPLAMFVSEVDREKYPDAAQTYRFERVDRSELAGAGSGRMERAEARKQAQATASFADEVQETEAEELTDQIRVSQMEQSLSDEVNPKLMQFFDADTLEEKYNILVSMRDEVDDHLINSMAVVLDVVIPEGPVADRYEQLKACIRTKQRYETQRMRMEEQMEKLSAIAQAKPYKIIISKPAGGEIPYRRIVIERKESYYQAAAYTEKQVFHENIPPEKLAEYLGKTAVGQYLQVNAWD

SEQ ID NO: 5 - protein, 1127650 aa, Roseburia hominis (residues 375,885-751,768 of 1,127,650)
  misc_feature (206027)..(206030): Xaa can be any naturally occurring amino acid
  misc_feature (267748)..(267751): Xaa can be any naturally occurring amino acid
  misc_feature (308138)..(308205): Xaa can be any naturally occurring amino acid
  misc_feature (435301)..(435353): Xaa can be any naturally occurring amino acid
  misc_feature (550632)..(550635): Xaa can be any naturally occurring amino acid
  misc_feature (643397)..(643400): Xaa can be any naturally occurring amino acid
  misc_feature (646104)..(646160): Xaa can be any naturally occurring amino acid
  misc_feature (694148)..(694210): Xaa can be any naturally occurring amino acid
  misc_feature (735460)..(735516): Xaa can be any naturally occurring amino acid
  misc_feature (749571)..(749574): Xaa can be any naturally occurring amino acid
  misc_feature (857718)..(857721): Xaa can be any naturally occurring amino acid
  misc_feature (861866)..(861921): Xaa can be any naturally occurring amino acid
  misc_feature (899281)..(899284): Xaa can be any naturally occurring amino acid
  misc_feature (1126885)..(1126888): Xaa can be any naturally occurring amino acid
DAAEHMYLCSKKGKVTYKTKKNAQTTAKASGSHNRMTVDWAQELGEQFCKEHFPGHQALICTHPDGHNHSGNIHVHIVINSLRIYEVPLLPYMDRPADTREGCKHRCTNAAMEYFKSEVMEMCHREGLYQIDLLNGSKERITEREYWAAKKGQLALDKENAAREAAGQPTKPTKFEMDKAKLRRTIRQALSQATSFDEFSSLLLREGVTVKESRGRLSYLTPDRTKLITARKLGDDFDKATVLALLTQNARRAAEQTKAIPEYPAAVKKPSQGEKTTKTTPADNTLQRMVDREAKRAEGKVGYDRWAAKYNLKQMAATVTAYQQYGFSSPEELDEACSAAYTAMRESLTELKQVEKTLDGKKELQRQVLAYSKTRPVRDGLKQQKNAKAKAAYRQKHESDFIIADAAARYFRENGISKLPSYKALQAEIETLIKEKNSGYNDYRAKREEYRRLQTVKGNIDQILRRERKPVKRQEQERMTLLATFKHISSKNADYGAAEAYLTFEHDEFTMKPTLDENGRLIPREDYRISSLNCEGEDFAVACMRANLRYEKNQKREDVKATTISSALTHGTGQTTDMRKRYNTPHRSRVVKTRMTEEEYAEFAERLSAYNMSQAEFIRQAITGAAIRPTITVSPVNDELLAAVGKLTAEYGRIGGNLNQIARTLNEWHSPYPQLAGEVRAAVSDLAALKFEVLQKVGDAVGNIQTYQLMDGLSGKDFFGGSVFPDNKAFRKLRFARCMKKWQPFWASLSNTELLEICQKWAQKKQQIFFGFNASCAAAGRRLFSCKMNQTQYNFSTSKTLVNILVYFLLFLAGDLFSSISFDLLFSFVELPSNALYVILRMLGALLLTAFLFWLYTTKGLHLKMKDFGITPNIKKWGVLISVFLPVFVTAIFAMIGKFEVNSLSAGEICLIIIASILIALKSGITEEMLFRGYIMKLLESRWNKYIAILIPSFLFSLVHIPSMETFTVSGVLLLIISGTVVGIMFSLVSYKGKSISNSALLHAAWNFIMITDILHITTAQGTYGSPIFSIIISSDNVFLTGAGFGIEASIIAIIGYILVCGFVLIPKKKMAFFNSAVTVLQTLVIALGAGLGIWGAINLLEGYGNDNPGANAHVRMYDELSLDTVGDKKTALFLIMSDTDPTFNFLISMIYTQLFNLLCEKADDIYGGRLPVHVRCLIDECANIGQIPNLEKLVATIRSREISACLVLQAQSQLKAIYKDNADTIIGNMDSRIFLGGSEPTTLKELNQALGKETIDLYNTSDTRGNSPSYGTNYQKVGHDLASVDELAVLDGGKCILQLRGVRPFKSDKYDLTQHPNYKLTAGADKKNTFSIETFLDHRLKLKPGDKYEVVDADHAKMLYTEKEKHEIERVKEVFAEHLRQSPDFELLWSDKVGYVWLTIGVNPLYVDTGIRIESAADLCCKCLDDVAMDVLYMTGNDHALEEADSLELAEIKRRWGPYINQLPDYAYLCKDLLNGKMMNKEPRTMQVSDAATASRAPENTPAMVKKIGKTTYKVRVHFSDTSTETMSDKIKRMLKNEIQQMMIEITAEIRALIDKAAAGVELAGDEYIDPADGLIHCKKCGGQRQTVVPCFGKPGYFMPRCICQCQQEAEEQRKAAEERQRRMERIKRRKAQGLQDRYLYDYTFANDNGQNPLMDKARAYVENWKEAYKNNTGLLLFGDVGTGKSFFAGCIANALLDQDVPVLMTNFPTILNRLTGMFSEDRSEFIASFDEYDLLIIDDLGVERSTEYAMEQMFFVIDSRYRSRRPMIITTNLKLSELKNPPDLAHARIYDRILERCAPILFDGKNFREENAGATRQTAKDIVNSKHDMSDNRKYYYLKLKENYFDDDSIVLLESMQDGVLYSNILLKLYLKSLKHGGRLQLDEDIPYTAQMIATITRQQIGTVERALQIFLKLGLVEVLDSGTFYMSNIELLIGQSSTEAERKRAARLQNKALSAPRTNGGHLSDIRPPEIELELEKEIEIKREIEKGHPAHAYGRYQNVFLTDGELADLQASFPAVWEQYIEKLSEYMASTGKRYQSHAATIRRWAGEDAKKAAPPTRNRDYSVKEDETVMKNNKTEPIPVMDYRQYRRARRLVHECCNYIDGNCIALDDGEECVCVQSISYSLLCRWFRAAVLPQDKELETALFHRLNAKKCAVCGALFTPGSNRAKYCPECAARMKRINAAKRKRKQREKCHALGAEKPLMAGNTTNISIRMDADLKAQADALFTELGMNLTTAFNIFVRQSLREGGIPFEVRLEQPNKETVAAMLEAERIAKDPSVKGYNDLDELFADLKRMKETKYTVKYTTSFKKDYKRAIKRGLKIELLEQVVALLAMGEPLPDKNRDHDLSGDWAGHRECHILPDWLLVYRIEDDVLVLTLARTGTHSDLFGKMTHDYTRKGGIVHAEIMLPANAPPEFADRSILWNSVEQIEKARDSQLAREIEAALPRELSGEQQLALVRAYVKDNFVDKGMCADFAIHDKGTGNPHVHIMLTLRPLKENGQWGAKCRKAYDLDENGQRIPDGKGGWKNHREDTTDWNDKGNVEIWRAAWAAYTNRALESAGRPERIDHRSYKRQGIDKIPSVHLGPAASQMEKRGIRTDKGEVNRQIAADNKLLKEIKARITRLYRWSKAEAEKPQTQQSSLTALWEAQQQLNAPRTRTGKIRALQESAALFSFLQANGIQSMQQLHEKIADMNSRYYDLRGKIVKAERRIAILTERGEMWEQYNQYKPIHKQLAKVKPEKREQFEQRHSRELILYDAAARYLKELKDSGEAITPKAWQREIDQLIAGKQTDTLAMKSMREDLKAVERLRKTAEQLSRQERDKSHDRGPERMDNAAFPGVVVGHSIPFICQLGSAAVSSCGNSRTACAALDNTDGDMTEIYGEHLLSVRGMNEKITAHPQKEEREKVLKEIRQLENRKKILENKQRNEERRVRTRRLIERGAILEGIFPLAPDLSGAEVKTFLIALSHLPGAAELTANLPKSGDTPMQTINLKQYYPFCKEDIFVEVSDEIVEAFLLDKRAEAARDRKMFRYKAFYSLDCNDGIENAAIGWAQPSPEDYLIEKEELAEYEELIRRLYEAISSLPPMQARRVHARYMLGMKVKDIAAMEGITPSQAGKSIHAALRRLRRYFARQKWTVNLMKTINLRWMYPHYRHDEFVDVTDEVWAAMYQAQREMENYERRKVYHRACYSLDAYRWLENYALEHSRSPEDILLEREEMITRLYLIAALPVALAHATPTQARRVHAYYIAGIKQPEIARREGIHSSKVSVAIRRGLRNMRRCYDDLFQTEMEVTINYNGQAVAVEVTLEVYEFLDRADHKTENLFHEQRRHWDGREFDEYIAFTEGVGVYSETPEEYLCRMETLHELMAVLDTCTEAQRRRFLLYALDGLSLAEIGVLCGCSKVAVYQSVEAVRKKFINFFENRLNEMIPVKKIVLSLCLILLGASVLSGCTKDEVLDQYNNIVQSAGSIALTGNSSLQGTKEKGIDDYTGSYTANYEDFSDTEYLFGGTSIKREAGKDLSIDCALEVTDGTAKVFWISGADEEVTLLETTGTYSDTITLPEGGNYIGIECENFTGSIELNMEMWDLLKAELLKLRRCQILWVGLVALALCPLVQYGSQLIVEAEYRNPNYDFSTLFENVVWGNTQMFFPISLVMIGSWLIDRESTHDTLKNIMTIPVSMPKMLGAKLFWVGIFAVLLGIYSVGVTLITGLTVGLSGLTVEVFFHGGTQIVLAALTTYLVCMPLILIFGQIRGAYLGGSILAFFLGYSMLFFKGGILASIYPFSAALILVGFDMSGYAGTTTAPNPLLAVIGVGIMVLWAVLLLLMSSNKKEIKSRKQANSKGKGKRAVRRKGRMLKLIKCEFLKLKRKPLVFISLLLSVFMPLAYAFFLADVNTDVDAVNGVMSSLFQLSAYLLLMPLLVILASNLLFEELDNDTLKNLVTIPINRTKLVLSKMLVLLLFAVGFMAVGGLVNLAVLLFQGWEPVGFWILFGVGIEEGLIMWVGALPCILLVVLLNKNYIVSVVITFFYTTANYILSMSDAFLTQPFGLNIGTLFPGPLAFRWTFQFYDQSQTSAELADLLERISPYFLNGVQVFGVIVVEAVVFLALIALVYRRQEIMDTNYIIETKNLTKQYGSQKSVADLNIHVKRGRIYGLLGRNGAGKTTTMKMLLGLTKPTSGEVKIWGKPLQGNEKKLLPRIGSLIESPGFYPNLTGTENLRIFATLRGVPNNHAIKDALDLVGLPYKDKKLFSQYSLGMKQRLAIALAVMHDPELLILDEPINGLDPIGIAEVRSFIRELCDARGKTILISSHILSEISLLADDIGIIDHGALLEEESLAELEQKSSKHIRFTLSDTAQAARILERNFHENHFSIQDDHNLRLHNLDLPVGKIVTAFVENGLEVSEAHTCEESLEDYFKRVTGGEGIAMEIIVFLSIVIAVLAVLTSIALVRRVKKQIAEMTDVLVDVKNGNGNRRILSATNELTAPLAYEINEIVVSYEGRLSIVRQTEETNRQLMTSLSHDVRTPLTTLIGYLDAAHKGLVTGKDRDDYIETARRKAHDLKEYIDVLFDWFKLNSNEFALEIQSVEAAELTRNILIDWIPIFEDKQVDYDIDIPEQPVRVRLDMDSYMRIVNNLIQNVIAHSHADKIKIALSKKENNMELLLADNGVGIEKEDLKHIFERLYKCDKGRSEKGSGLGLSIVHQLVEKMGGSIAVESLPGKGTEFMLLFPLESMNKILIIDDDRELCALIKRSVQAENIEADFCNTGKEGLQKLKEQEYQLVVLDVMMPGMDGFETLEEIRKENSLPILMFTSKNDSISKVRGLRAGADDYLTKPFDMDELIARIASLIRRYTRFNHQAGAVQKLDFDGLQIDLENRSVTTENGTFELPPKEFDLLLYCAKHQGKILTKQQIYEEVWGEEYFYDDSNIMAIISRLRKKLEVNPSSPKYIQTVKGIGYRFNKEVMDYMTLKEAAEKWGVTPRRVNYYCAGERIPGAVKMAGIWLIPKTAEKPIDGRTRQGKELRHEMAKVEDCPGFETFGADVKAAREAKRLARKTLAEMVGIEWRYLANIENQGAIPSLPVMIQLIKVCGLPVERYFNPEIMREESEQRQRVSHKLKLCPEEYLPIIEGAIDGALKMEQTAKQKEDAMLTFEKVLKVFQAYLDDDPLYEVVQTSHGYTLMAWEPHRNDWYSAEIQKTPEDLRNALLGTYANFLEDKITGNERELTVTETGEIQQRCRELLKKCREPMSKLTYIRCGDYDIPNLKLSEQPETSIGKYGRMRKSYLKEHRPILYNQLLMSEELYPHLLEIDRIAQERMDTMLPHMMEAAGVTEELKACDPMRWVGLMNTLTAQIEEILIRELICSMRNEKITPLYERLSRDDELQGESNSISNQKQMLEDFARRNGLPNPTHFTDDGISGTRFDRPGFLAMMEEVEAGRVEAIVIKDMSRLGRDYLKVGQVMEVLRQRGVRLIAINDGVDSLKGDDDFTPFRNIMNEFYARDTSRKIRSVFKSKGMSGKHLTGTVIYGYLWDEKREHWLVDEEAAEVVRRIFSLTLEGYGPYQIACKLSADRIEIPVVHLARFNEGVNRSKPVKDPYGWGSSTIVNILKKREYLGHTINFKTRKHFKDKKSHYVSEDEWTIFENTHEAIIDQQTFDLVQKIRSNVRRYPNGWGEVAPLTGLLYCADCGGKMYVHRTNNGRRISQYTCSNYTKIPCGTLCPTQHRINEGAVLTLVSDTLRAIAEYSKNDRTEFIHTVQETQVAQQSADTSKKRRRLAAAQKRAGELEKLICKIYEDNALGKLPDARYKALDAQYAKEQDALEIEIAELEKAVTGYEQSQKSAEKFIALIDKYENFDTLTNTMLNEFVEKILVHERSRKGSQDTTQEIEIYFNFLGRYIPPSLQPVPLTPEEQEELRKKEERKDRLHQNYLKRKASGAQKRYEDKIKAKKKAEMDAKKALIRAEDMKKGVFSTVGQLPKEEPRKGSIAASAAVMSNKTKKLLILNLPYFIAGLVCTNLGEAWRIAEGADMSEKLLGFLSALGAAFSNPMPSLHPLDLLIGVCCGAGLRLAVYLKGKNAKKYRHGMEYGSARWGTQKDIEPFEDPVFANNVILTRTERLMMGNRPKNPANARNKNVLVVGGSGSGKTRFWLKPNLLQCHSSYVVTDPKGDIVIDCGQALLKNGYSIRIFNTINFRKSMHYNPFAYIHSEKDILKLTTTLIANTKGDGKAGDEFWTKAETLLYCALIGYIHYEAPLEEQNFATLIEFLNAMEVREDDETFQNPVDQMFEALKKKKPNHFAVRQYAKFKLAAGDICSKMQEEVENRTVNLAISTTKLTFRTIVNGYNAWKRHHQAKAAQKSAQMPLGKQSIKELIGQNQGVSSIPIEKTDLKGFEQVARKYGVDYAITKDQNVIPPKYTVFFKAKDADALTSAFEEFTNRKLKAKEKPSVLEQLNKLKELVAAILPDKVRHKSQERDLMKKFDVEITETLQRKVSVEAASQEDAERMVTQAWNNQDYVLDSGDFTGVDFKTVGEHELAETRTMDVLLVQPNAYPKKISVGTELEDLQAMVGGDIEVTYPFEDEVAIILNESGKINGLPLNRAIYTEDGDMQDIYAGDFLVVGLTEDDFGSLTSEQMQKFEEQFHQPQMFVRMGRSIMAIPVPDDMVKKMEEKAAKPQEKSKPAPDRDSLMMMNFKKNQNNAVCSMDCKNCPHGASQPNPMDDPMFEKSIAMLHNWLMLEAIREDHPKERIVMVILPGAGGELLTEDGSRDIFEDVYDEMEADLVADGELLLHYDKSDVIETDRTRYLLGAAEVSEIDQNGNECSINLFTLERTIDYVNENLTVVSIGGELVPALRLIMPLSDLHPFEGHPFKVLDDELMEQTVESIKQIGVVSPLIVRPDPEGGFEILSGHRRLHAAQLAGLETVPVIVKEMDDDAAIIFMVDSNLQRENILPSERAFSYKMKLEAMKHQGQRKDLTSEQFAPKLSTEIIGEAVGMSKDTVKRYIRLTNLIPEILDMVDEKKIAFNPAVELSYLKPSEQKEFLEAMDYAQASPSLSQAQRLKKLSQEGGCTLDAMCEVMNEIKKDELDHVTIKNEVLRKYFPKSYTPKQMQDTIIRLLEKWQRSKQRDMERMKCKAKKAFFAGKNDIYHRWKEVKKLNGKSKNQYYNRKPQWLSCRRCGMSDMVPEVLNAALDSLFTPKEPGEQEYQGVDGLLYCRNCHTPVQCRVKLWGRDKIVPCLCRCQQEAMAEKKRQDELVERQRKIRQLKATGIQEKHLLEWNFGVAEDNKDIQMAKRYVEQWKKVKAENLGLLLWGDVGTGKSFVAACIANALLDQGIPVLMTNFSKILNQMGAMYSEERYRYIASFSNYSLLILDDLGIERSTEYALEQVYAVIDERYKSGLPVIITTNLKIAEIRNPQDVAYARIYSRILEMCTPVRISGEDRRKSIGKEKQQVVKEVLDLMPVFRVEKNSNYTTMCNYHLRDQGLSLKGKGLLSMLLSLPDTWNYSVRGLSSITPDGVDGVLTALKELERLGYLERNQQRESNGRMGRAEYVIYEMPRKKPCSESPCTEKPYTVNPDTDTPVTENPAQLSTNRTSTETINKREKKEIQHRYGSYENVLLSDTEYGKLRQEFPGDYQMRVERLSEYMASTGRSYKNHLATIRSWAKREKPKYNPADYTFEEGDSLMTLFTEGRLQAFERMMQDTGKYHRREDSEDRSRKCPKKKTEPAKKDGEHHAGIQGMTDFNQKTHDTDVGSHGGQSRQMMEVFENQEFGSIRVLQEAGKTFFCASDVAKALGYVNPYAAVKRHCRGPLTKREGVVQKVNQYGDAGEQVVEISFITEGDVYRLIVHSKLPSAERFEHWVFDEVLPSIRKHGVYMSDSILDQVIQHPEVIYTLAQELVAEREQLEGIRKQLDAAQPKADYFDTFVNSEDCTCIRNFCKEIGIPEKTAVALLLDHRYLYRSPSGWLMPFADKSARGYFIVRDCYGRSGKLVQQTRVTCKGKNHLFKLFKKWGVIEMANAKYYGTGRRKSSVARVYLVPGTGKVTINKRDMDEYFGLDTLKVIVRQPLAATETADKFDVLVNVRGGGYTGQAGAIRHGIARALLNVDADYRPILKSAGFLTRDPRMKERKKYGLKAARRAPQFSKRMKTFMASPATIDRKWYVVDAEGMTLGRLASEVAKVLRGKNKPIFTPHIDTGDYVIVVNAEKVKVTGKKLDQKVYYNHSDYVGGMKETTLKEMMAKHPERVIEHAVKGMLPKGPLGREMYTKLFVYAGPDHKHAAQKPEALTFMEKEVKRVKMTVAYDGTNYKGWQVQPNGITIEEVLNRHLSSLLGEEIAVTGASRTDSGVHSLGNVAIFDTTTRMPADKISFALNQRLPEDIVVQGSCEVPADWHPRYQNSRKTYEYRILNRTFRMPTRRLDTYFYHHSLDVEKMSRAAAYLEGEHDFKSFCAVNAQVKTTVRTIYACSVTKADDIITIRVTGNGFLYNMVRIIAGTLIQVGGGQIEPEQIEQILAARDREAAGPTAPAHGLTMMGIEYMEEKDIDTQGVVMLRDITLGQYYPADSVIHKLDPRVKLFSTMIYIISLFCFRGVAALAIATVFLITVIKLSKVPFKFMVKGLKAIMILMLITAVFNLFLTPGEALVSVWRFTITKEGVTSAVLMAIRLTYLILGTSIMTLTTTPNQLTDGLEKALMPLSKIGVPVHAIAMMMSIALRFIPILIEETDKIMKAQMARGADFESGNLLKKVKSMIPLLVPLFVSAFRRADDLAMAMEARCYNGGEGRTKMKPLRYEGRDRLSYLIMWLYLALIILCRIFVPWPQMSIILDKVNFVYSEETAYQIQALKDVNLEIKDGQFIGIIGHTGSGKSTLIQHLNGLMKATSGTIYFHGQDIYEEDFDLRELRNRVGLVFQYPEHQLFETTIFDDVCFGPKNQGLSKEEAGLRAFEALRSVGMPEELYYQSPFDLSGGQKRRVAIAGVLAMKPEVLILDEPTAGLDPAGRDEILDLVARMHRERNMTVILVSHSMEDVAKYVERIIVMNHGQVMFDDTPKEVFRHYKELETIGLAAPQVTYLMHELKEHGLSVDTEATTVEEARASLMQALTGIDSGRSDIHRMGIIKARQLVHEYIRRDEEGNVESISTALDHVDLDVEAGDFIAILGHNGSGKSTLAKHINALLLPSEGSLWVDGRDVTKEENTFAVRQTAGMVFQNPDNQIIASVVEEDVGFGPENIGVPTDEIWKRVEESLGAVGMLSYRHHSPNKLSGGQKQRVAIAGVMAMEPKCIVLDEPTAMLDPNGRKEVIRTAHELNRKKGVTIILITHYMEEVVDADKVIVMDQGKVVMQGTPREVFSQVGKLKEYRLDVPQVTILADLLRQSGIDVPVGVLHRQELVDAILRVAQIGEMAKLNVVLYEPEIPANTGNIGRTCVATGTRLHLIEPLGFHLDEKAIKRAGMDYWSELDVTTYVNWEDFCGKNPGAKIYMATTKGRHVYTEVSYEPDCYIMFGKESAGIPEEILKANPDTCVRIPMIGETRSLNLSNSVAIVLYEALRQNEFDHMKLQGELHRLRWEDMRDPLNKTITTIQPSGIRKFFDVVHEMKDAISLGVGEPDFDTPWHIRDEGIYSLEKGKTHYTSNAGLKELKVEIDHYLDRHYGVSYDPDHEIMVTIGGSEAIDAAMRAMLDPGDEVLIPQPSYVSYVPCAVLAGGVPVIIELKAENEFRLTPEALEAAITPKTKLLVMPFPNNPTGAIMEKKDLEKIAEIVREHDLYVISDEIYSELTYLEQHVTIASLQGMRDRTIVINGFSKSHAMTGWRLGYACGPRIIIEQMLKIHQFAIMCAPSTSQYAGVEALRNGDEDVAAMREEYNGRRRYLLHRFKEMGLSCFEPFGAFYVFPCIKEFGMTSEEFATELLNQQKLAVVPGTAFGDCGEGFLRISYAYSLDNLKKAMDRMEAFITDLRKRSMREKILTFIEKNSRIDLKELAIVLGVDETTVMNELEKMEEEHIICGYHTLIDWDKAGIEKVTALIEVRVTPQRGMGFDKVAERIYNYPEVNSVYLISGGFDFMVTIEGKTLREVSQFVSDKLSPLDSVLSTKTNFILKKYKDHGTVMAEQPKDERIEMMKIGKLPESVLKRSVFKQIHTRRPEVVLGAGVGEDCAAIKLAEDETLVMSTDPITGTAKDIGTLAIQITVNDLASAGAEPVGVLLTVLLPESVEEPELRAMMAQVEEACAKAKIQVMGGHTEVTAVVNQPVISVCGVGKVKDGCLISTGGARPGMDILVTKWIGIEGTSIIAKEKETELETKFSVPFVEKAKALDAYISVQSEAAVAVKSGVSAMHDVTEGGIFGALWEMAEASGVGLEIDLKKIPVRQETIEVCEFFGINPYQLISSGCMLMAAEDGNLLVRELEKAGIPATIIGKATAGNDRVLLNEEERRFLEPPKADELYKAIMKKGTGFLTLFGGAVALYALLAAPVSMRAQETETIEDGVYIGNIYVGGMTEEEAVSAVEAYVESADSAEMTLKTGDKSVSVTAADLGISFSNLNVVDEAIDVGRSGNLIKRYKDKKDLQQGDKVIALSLDVDSDAVASILSEKAAQLNQEAVDNGLVRENGAFKIIKGEQGIEVNVEDSIAAIENYISSEWDGGNAEIELVAEVVEPRGSEEDLEQITDMMGSYTTNYKDSGQNRCDNISNATSKINGTLLYPGEEFSVYEAIGPLDAANGYELAGAYENGQTVESYGGGVCQVSTTLYNAVILAELEITQRSNHSMIVSYVKPSMDAAIAGDYKDLRFVNNQDIPIYIEGYTEGKNVTFKIYGHDTRPSNRVVTYESEVVSEQDPGTQYVATGDPAGYMKTAQGKHIGYVARLWKVVTVDGVEESREIFNKSTYKASPKIVNVGTASADPNVSAVIGAALATGDEATINAAVAPYAASAAAILNPAPVEQPSQEEQAITGTVDESQITGGEMYDFGKKKNKKLLAGIIIVVVAAMLLTTVLAALLMIFLGLFIFFVCMFAYLRHKSTAAEEAAAESFWNRENEANHTRRKDISGLPYITIPLADFPMGIYDNPELKKYEETLQSLAGQKILNLGGKTNTDLKLEYGVANLETLCACDENYTTLCRTIYEYAECLKKLGHDAEAVRVLEYGISCGSDHSGNYRMLADYYLNARDSDALDRLLIAARALESPRQNAIVAMLEEKVNAMLEDYVVIDLEMTGLNAKTDAILEVGAVRVRDGRQTETYGAILKCGRELSERVVELTGITPEMAAGGREPEEAMREFFTFLGDDVLVGQNVIFDYSFLKQWSVNHGQAFERNAVDTLKLARRFLPAEQKKDLESLCTYFGIGRERAHRALDDAMATGIVLERLKQEYGTAQPEEFLPYALCYRTKKQTPATGRQMDGLKKYAAHYGIPETEIPEQMTRSEASRLLDRWIAVHGRMPRDMKVLLTAVNAKYIHSNLAVYDLRAYAEAYGTGGAQVEIGEYTINHTIDYILEGIYKAKPDVLCFSCYIWNLDYVEQLMDEYHKICPEVPIWVGGPEVSYETEAFLKAHPQVTGAMVGEGEETFLELCENYAKAGAGAKAGKVDFPGIKGIMYRAGESLVKTGAREPLDLNRIPFCYGAVEDFRNRIIYYESSRGCPFRCSYCLSSVEKTLRFRDVERVKKELAFFLEQEVAQVKFVDRTFNCRHEHAMEIWKFLIEHDNGVTNFHFEISADLLTDEEIALIGQMRPGLIQLEIGVQSTNDATITEIHRTMQLDRLKAVVRSIQEKENIHEHLDLIAGLPYEGYETFARSFDEIYALKPNQLQLGFLKVLKGSYMYEHATEYGLIYRSRPPYEVLKTNWLKFGEILRIRQVEEMLEVYYNSGQYATAIRLLETQYASAFAMFAEMGTFYEEHGYFGMGHSRMRRAEILLEFAKERKPGLLPVLGEGLVYDLYERENLGSRPSWAADANEWKQIARRYGKNGKQSHIERFFYRFSGHRQDTASLPERLEEPVYVRFDYTGRDPLDHQARHEYLEPSGEMEKIRHDSSYEWLSGESWKEWSASFFSMGWKIWGVVLITELFLFLFFKPTADCGRLRYGWLFIVRPSGLQLLLLFVYRLLTGRQKRVYSRRAMAGCAIFLLTSYAAVMAWVHTSVTLMPMVLLLPMLLTPLYKDRVMTLVQAALLVAAYVLDCVYFIPASSYFPVTTPFIEGSIFVGTVCGMLVALELVNDSAIVNDERSKRDSLTKLYNHESFYEELEYYQRRYEENRERFSLAVIDIDNFKNVNDTYGHAFGDVVLKEVADICARHKGAAGFCARYGGEEFAIIFKGAGVGQAEEMAEQIRQEFEQKMFTTPQGERSFSVSIGVAEYDRAYPGASAFFEVADAALYCAKREGKNQVRRMNWIENVLIIAGVSLDIFAAMECQGALVAKVDKKQLSVICALIAVWQLCALALGNYLSGLLYRNELAHDENFVGLVIAAVIFFGLGIRLIAKAIKNEWVNERREETLDVKKFLRMTAVTSIYTLLAGIAFGFLGTNVALMLIIIVCMTIAFVVLGVYTGYHLGFQHKTKAYVGGALLLWIAGIDVIVRHIMCMKLPELKSKFKNRYAIRIIAGVLVVTLVATGSSVYSVNAAKAGSAATETVEETEVSEEAEDTEDAESSLKDLLDNGSKVSEKEIGKEETVYVIADNTGKEQKIIVSDHLINNDDKDTLEDASTLKDIENVKGDETFTQSGNKVTWQADGNDIFYQGTSESELPVTQKLTYYLDGKEVTPEELAGKSGEVTIRFDYTNNQKVTAKIDGKDEDIYVPFMAVSGMILGDEFSDIEVENGKVISDGSNNVVVGYALPGLKESLNVKDDDFDGDVTIPDYVEVKAKVENFKLDTTMTVVMNATNFISADSDNDTSKLDEVFDTLTDAMDQLTDGSAELADGVDTLKSKMGDFKDGVGTLQSGVHAYTDGAGKIASGITQLSDSIPTLSNGVGTLNSSAATIADGVELLDNTLKTSFTDQEKAAMQTQASSAVDAQAEAIKNRASAAVDARAEAIKNQASSTVDAQAEAIRSQASAVVDAQAEAIKTQAEAVVDGQAEAIKNQAAQQAGAKFDNGQYEAIKNQATQEITTKMDGLKGSLTSSADVQNLINGAALASVAAQYPGENIADIPSNHPDKYAEAQQTVAAQLDTTITTQLGGAADSLATGVADTAKQVAQATAGEAAVTGAKTAAGDAAVLGAKAAAGDAAVLGAKAAAGDAAVLGAKAAAGDAAVLGAKEAAGTAAVSAAEQTKSTMAASIEQQSSGGYSLVTGARALANGTQSLADAVPALTSGVAQLKNGSAELVSNNQKLNDGVNALSDGTDAVIDGVDQLSDGAHQLADGIVTFNEEGIEKILNSYHGDIEPLMDRIQAVLDAGEDYQTYTDIADGVNGSIKFIYKTDAVKEDMIKFGKAVVKLRIPILILSIFLLIPSAIGYFNTRVNYDILTYLPEEIETMKGQDLLLDEFGTGAFSFCVVEGMDAKDISAMREQMEEVPHVKSVIWYDSLADISIPMEMLPDEIYDFFNNDEKDSTLLAVLYDTSMSADETMDAIEELRGVVKDQCYISGMSAVVTDIKNLSNKETPVYVLIAVVLAVIVLSLTMDSALAPIFFLLSIGMAIVYNLGTNVFKGEISYVTQALAAVLQLGVTMDYSIFLWHSYEEQQERFQGDKKRAMAHAISNTITSVVGSSITTVAGFVALCFMSFTLGMDLGIVMAKGVVLGVICCVTVLPSLLLVFDKAIEKTKHKVIIPDLGRIADWIVRHYGVFLIVFLVVLGPAIYGYTHTDVYYDLAGTLPKSLSSITANDKLNEDFEMGATHMIIADSSLSAKDASAMLDEISKVDGVKMALGFDSLVGPGIPREFIPDDVKDVLINGDYQMMVVGSEYAVASDEVNAQCEEINNIIKKYDSSAMLIGEAPCTKDLIEITDQDFKTVSIVSIGAIFVIIALVFKSVSLPVILVAVIEFAIFINMGIPAYTHTTLPFIASIVIGTIQLGATVDYAILMTTKYKKLRYNGADKKEAIVTALRSSIQSIIVSALSFFAATFGVGMYSNIDMISSLCILMARGAIISMFVVIFILPSMFMIFDKLICATSMGFRKKKGTTVNVSENNVSVQMTGQGKSAIDTLLAESFKELALKQPIEKITIKEITDKAGVIRPTFYNHFQDKYDLLEWIIDKELLEPVEPLIQNGMINEALVLLFGSIERDKEFYTRASRLEGQNSFGSIAQSCVERVLLQVIKGQAEGRKSRYVWLTPERIAEYYAQSMCYVVITWIKSGMTISSRELAEIYNYMIKRSMTDILTELMRYLPTSRLTPGMALGQDIYDGAGRLLLGRHILLTEEQISNLEFLGFPGVYVDDEFSRGIEIQQIVSPEVRRQALKIVYDLFHTDMRKQEPSEAEFKLRKTVESVVDDVICNGDIMCNIMDIKSYDDYIYYHSIHVGILSVVVGARLGLPHDELCQLAAAALLHDIGKRFIDHDIVRGGKAHRSEEEQEVYRSHPKIGAEYLRETCRFSADVYEGIMEHHECYNGEGYPLGKKGAEIHLFARIIRIADCYDAKVSAFPAQKSLSPSEALEYVMALGDRWLDPDIVAVFARKVAAYPIGCEVELSNGQHAVVARNFENFPLRPLVRVVETGEMLNMRDDEKARAVTVGRLIVRMRREEFKMERTGLLEVGDVLPITEGKLPNSYYYTLGKAYAMSANYVVSQRIKSREGTVVDVKETPKGYFVTVEFDEMSDQTVLIDQFLSSVIGTIHPDEIFDSIIDTAVRLLSPDGLLLTIRDDVSPSYHVTRSFGDISWEKDSFLDSSILLEQLLNADSYIPFMPGAGLPTALDGVSSHTRSWLIRQNIIGVYCLKYNRALIGFLFIALHNHMPLSADQVSALCKIGFYATHALRNANLYMNAYRASITDDLTALYNRKHAFEMIDELCLSGTPCSLIMLDIDDFKLYNELYGSKEGDHLIQRCAKIILSALDEDDMAFRFGVDEFLILRRGSDAAAAKAFTQSLVEVLTKGSMPDMVWEITITCGISVFPDISADGRELIHNVEQAVYFGKLDGKGHLIVYRKGLENRSQNPDIRTAYERVAPTIYALTAAIDAKDNFTFIHSMNVSKYAVMLAEALPMSDNDIEVVRVAGMLHDIGKISIPEHILKKTEGLTPEEYAIMKTHVENSIKMIRYLPNMDYVIPAVIAHHERYDGKGYPRGLKGTGIPLMGRILTIADCFDAMTARRPYKQERSIDYAAGELKKNSGTQFDPELVPVFLSLIEDGKIAGMNKKYSIVYSSLTGNTKMLADAIHGALPQDECEYFGVSDTVIPSSELLYHMCQGRMPQSVWERYLKMKEAPAHPANLDVLIQNFDCALSHPDANDLEKLKEAVMDPSFMINDIFKVFGEQTAEILFEIVTECMDDYLYIFDLQDNTFEISQSAVNRFNMSESVLTDAVNEVMKVVYEEDRRMLAKHLADICEGREKVHNLHYRWLDKEGMPVWINCRGIVISDQQGKAEYLVGCLNETGNKRRADNVTGLLGGPEFLAYLRAQKEPITKGFFMHVGIDDFGAINSSRGADYGNYILKSVAGCMKECLSDKQRIYHLVADQYVIVDLEASSAEDAVALKEKITDKLQNFIVAENYEAIFSISIGVIDAATFCEGTEECRKKFEFALKQAKSMGKNGFYFFDKDDYEVFLRKGRIIATLRNAIVNHYDGFEVYYQPIVDCQSEQIIGAEALMRFSMITEEGREFVSPMEFIPLLEETGLIIPAGRYILNEAAAMCCEMQKYIPDFRMNVNVSYVQILQGNVERDILDAIQKYSLQPECLCVEMTESGFMDMTPSFCKFRKILDKNGIPFVIDDFGTGYSNLHCIRDMNPSYVKMDRDFTAKAMNSDRDYELYKNIIPMVHSINVRICAEGIEEKEWLLKMKEMKVDYLQGYYFGRPCGKKQFLQQYASGINVKMEKIKKRITNLKVAGKLKVYRMTVLVMTLFLVLVALISTLVIRLNIEKITEVWSPSLEYLQDLETMTAKYRIKQYQHLVESDAAVMNSCEEEITKLESQIEDTGAKLDAIISADSKAQKGRDDYDVANAAWEKYRAASDEILQLSREGKQQEASKLMTGEVYEEYKAFAEKLTTLCEKFQVELDQAKTMANVCTVIIFIVIVAAGLAIAVVTTLIGGIITNSITEPVEQIEAAVASLRKGELSNVEMLTYESEDEFGDTIRNLKEAMGILADYVSEISVEVKAIAQGDLTRNGDDITDFLGDFSELKTSLLYILKRFNSTLTEISNLAEQVSSNSSEVENASKSLADGATEQAGVIEELNATIDAVVDLAEDTAKETQSASARVKASANKANEEKEKMNELLTEMEYITEISKEIGNIITDIEDIASQTNLLSLNASIEAARAGEAGRGFAVVADQIGKLAADSAKSAVNTRELIDKTLVEIEKGNTITRTTAESFNQIIEDMKSFAELAENTMEKANSQAESLEQIGQGIEQLSGVVQGNAASSEENTAISINLAEGAAKMHDRVNIFKLFMNKSITQAPQNDKQISKSIKRFFTRFHISSALKAANAYKRKGTPVTEIFQYMFLLIFSNRSMYMSLLTGKNTPNFAKATLTMLLQMFRTMLSDNTELSDEKINELANAFMDALPTMMKIRLQAAMSFIIKKENEGKSRKQAKIAGLNKFLQIYYARVMEIYKNIAMKETLKRIKADIIVSALLCIALGIVLLVWPAETIDVFCKILAVGLIIMGGVNIASYFMNRSIHPFAGALGLIVLLIGIWIFLRPESIVSLIPIVIGVILCVHGIQDLKLAIETKRNGYEKWWSMLIIAAVSLVFGVLCIVNAFGMVKLALQFIGIALIYDGISDLWVANRAVHAAKMMKQEAEAVDVDYKEIMGKEVKTNAMRILDKNKIPYEILNYECGEFIDGLHTAEATGAPVEQSFKTLVMQGKSRQYYVFAIPIADEVDLKAAARAVGEKSVEMIHVKDITAITGYVRGGCSPLGMKKQFPTIVHESAAAFDKIYISGGRIGTSITVNPDSLLTVVRGQYADVIRHEMVLLGSATEGTNRMETKDADGYQMVKEIIRVGQEPDGGYTDYVFPKEGETESSPKRSYSRAFERFGWVVGTGNYIDYIDETVEKETQAMRENVKTALIAIIGTGSLLIVIVMAVCLYMAFSLSRSFQVAQIQKVTEEVTSSVAQLSSDAEQLLAFVGNDVVASYDTFDEAADAYNQDAGKIDALISDFSATSEELLASIDGVLDAMEGMATATNEGAKGTIDIAQKTVEVKSKADTMAKYIMALDAGTTSNRCILFNEKGEMCSVAQKEFTQYFPKPGWVEHDAEEIWSTQLEVAKEAMANVGATAADIGAIGITNQRETTIVWDKNTGEPIHHAIVWQCRRTSEYCDSLKAKGLVDTFRQKTGLVIDAYFSGTKLKWLLDNVEGARERAERGELLFGTVETWLIWKLTQGQVHVTDYSNASRTLMFNINTLEWDEDILKELNIPKCMLPEPKPSSCVYGEANPVFFGGPIPIAGAAGDQQAALFGQTCFTAGEAKNTYGTGCFLLMNTGEKPVFSKNGLVTTIAWGLDGKVNYALEGSIFVAGASIQWLRDEMRFIDSSPDSEYMARKVKDTNGCYVVPAFTGLGAPYWDQYARGTIVGITRGVNKYHIIRATLESLAYQVNDVLAAMKADSGIDLAALKVDGGASANNLLMQMQADISNAPVNRPMCVETTAMGAAYLAGLAVGYWASKEDVLQNWAIDRTFTPEITDEERNKKVRMWKKAVTYSFNWAKEDMTPYIAEFVGTMILILLGDGVVANVNLNKSGMKGAGAVQITLAWGLAVLVPAFIFGAASGASFNPALTIALAADGSFAWSMVPGYIVAQLAGAFCGACLVYLLFKDQFDATEDAATKRGVFCTAPAVRNIPRNILSEAVGTFVLVFAIKGLAQVPDLADGTGKFLVFAIIVSVGMSLGGLTGYAINPARDLGPRLAHAVLPIQGKGSSDFGYGLVVPIVGPILGALAAVLVYGLIFMYDVVIIGAGVSGSACARELSRYNLSICVVEKEEDVCCGTSKANSAIVHSGIDCKPGTLMSEMNVRGNELMEPLSKELDFEFRRNGSLIVCFSEEDRPKLEALYEQGIANKIPDIRILDAHEVHEMEPNLSEEVVAAIYCPTGGIVCPFGLNIALAENAATNGVEFRFNTEVTDICRKDDGYQLSTNRGYILTRCVVNAAGVYADVFHNMVSSKKIHITPRRGEYCLLDKTTGGLVDKTIFQLPGKYGKGILVTPTVHGNTLIGPTADDHDDKEATNTTRQGLDHVCSAARRSVPSVPVRQVITSFAGNRAHEDNHEFIIEELADAPHFVDCSGIESPGLTSSPAIGERVAQIVSGLLHAQKNPAWNGSRKGVLNPKTLSEEDYAALIRENPAYGNIICRCEMITEGEILDAIHRPLGARSLDGVKRRTRAGMGRCQAGFCSPRTMEILARELGISQLEITKNGGSSNMVVGLSKDRTMTSYDIVIVGGGPAGLAAAVSAKNNGIDRILILERDRELGGILNQCIHNGFGLHTFKEELTGPEYARRFINQALDLNIEYRLNTMVMDISLAEGSSDKIVTAMNRTDGLFHINAKTVILAMGCRERSRGALNIPGYRPAGIYSAGTAQRLVNIEGFMPGRKVVILGSGDIGLIMARRMTLEGAEVKVVAELMPYSGGLKRNIVQCLDDFGIPLKLSHTVVDIRGKERVEGITLAQVDEHNKPIPGTEEDYECDTLLLSCGLIPENEISRSMGVELNPVTSGPSVNESLETNIPGVFACGNVLHVHDLVDYVSEEAGVAGKNAAKYIKCGGDHADSGKEIPIVATDGVRYTVPKTLHVANMDDELTVRFRVGGVYKNCYISTYLNDQRIICRKRPVMAPGEMEQVKLQKSVLEAMSDLDHITIKIEEEAMETRNLTCIGCPLGCAITVTMDGGNVVSITGNTCKRGSDYAAKEVTHPTRIVTSTVCVRGGSIPMVSVKTAQDIPKEKIFEIMKYINALTVTAPVHIGDVLLKDIAGTGVDLIATKEVLSMCYSTKKKIADCVRQLMKRKEISKITIGDIMEATGMSRQSFYYHFKDIYDVLEWIGCNDFKDQLQGQYDSMEKWACDLMEVLQRERSFYEKLANELAWPMIVRGVRMALDAQVRRLLLGENPGMFEKHPEELEAVTSFLSTSICYYMIDFVYYRKTLSGEQVKRDVQFMMRAIAKPDAGLAVLLPRTAVLMKQQFYDAIVDGPIIAAVKDETGVEVCIQNDIRVVFILYGELITIPDIVQRLKDAGKFVIVHLDLIGGLAVREEAVRFIRYGTAADGIISTKPEMIRYAKELDLCTVFRIFAIDSKAIGGLEHHGMEFADLIEVLPGIMPKIIKHIVGQAAVPVIAGGLISEKEDVMRALDAGAIAISTTNQAVWKMMCSLRDFLTSAMGNIIMEMMRQECHDAAGENGGSADKRMSYRNEGIHKDTIRDACPAGIGVRLFMEKEAHYFDAILMDIVMPKMDGFEAARQIRRVSHKDAQMIPIIAMSAKDAREDMDACKEAGMNDYLAKPVEPQRLYQVLAEYLENPMMDEKMTMEITNDRLEEAIKQYAAERTKENLTTVLNLLRPTKLYVPAMLKAPDQPTPCFLKNNKGEQFFVAYTSKEQMPEEPKSQALLFMPFPACNNIVVKPELELTGLVINPFSDNLVLKTELVRKLHEADQKAAQMRQVKMTPQQFNVFVKKQVEFGVLPKRLYAEGETFVQKLCEEREAFVNQIFAETYKEPKLYPYTEADYSVMALDIAEDLTLIRVDLPEKALAAPLCYRIYITFNPQTKKAGYYTIEMTAEKEVRALGQILPDGRHESLGEAPVEGAELQKIMDLARYDGTEMTSMKNVSVRWKMIILALITLIGTLAIGVLAVNRMLVMEEGSESVLRTSIEDDYDENIKNQVDNAISMLDAVYAGYENGDYSYEEAETRGADLLRELRYGDGGYFWADTYDGDNVVLLGSETEGTNRMETKDAEGYQMVKEIIRVGQEPDGGYTDYVFPKEGETESSPKRSYSRAFEPFGWVVGTGNYIDYIDETVAKETQAMKENVKSALLAIIGMGSFLVVIVMAVCLYMAFSLSKSFQVALTYIGYITKGDFSQPLPVQLENRRDDFGILGERLENMKCQIRDLIREVKNESYVIGEVVDTVKTNVITLNGNIEDVSATTEELAASMEETAASSDTIKSMSLEIEEAAKNIANRSQDGAQQAADIHERASKAQNDTREQREHASRIHNEIRESLTKALEAAKVVQQIEVLSSAIMEITNQTNLLALNASIEAARAGEAGKGFAVVATEIGGLADQSKQTVTQIQKVTEEVTTSVAQLSSDAEQLLAFVGNDVVASYDMFDAVADAYNQDAGKIDALISDFSATSEELLASIDGVLDAMEGIATATNEGAKGTTDIAQKTVEVKSEADTVTDEVGRCDQTAQRLTQDISVFVVDMMSQESMMKKKLENMHLKERIDYGYRKVITMMLISGLLSVVIIGVLFANMMHYVENVNVADQAVKICRINVNAAARNIREMALNEDTSSYDNYEQTVKRLLSEVDSELQILKKTEVLSDENYEEYATALSDWGKIGYSIIEEIKNGNDENATDAILNNCTPALNKVVEIAIKLDELTDEASSETVRNMVVCTVAGFVVIIVCLVFAFTLTRKTSKRVLETILEPLHAIEDVAMELTEGNLHSTLEYHSDDEIGKLAHSMRKSIRILGTYVDDIDRSMKLFSEGNFDVHPEVEWRGDFVGILNSFMAFQASMAGTIKGIQNVSNEVSGAAEQVASSSNDLADGATNQAAVVEELTATVTGVSEQVEKNSQSAKEISVKVDELGNAISESNGKMHEMVDSMHEISEASKEIDKIITTINEIASQTNLLALNASIEAARAGEAGKGFAVVANQVNVLADQSAQAAKESATLIETSVKAVEKGMVIAGQTAAQLEEVAENSKLITTEVTNIAETLETQTTEIKQINEGIEQINDVVQTNSATSEECAAASQEMSSEAESLREMIRKFKVAEDKKTVMGESGILLLIFLLLLGAILAVSIVLIRKAERERDEALQHVADARTDFLSRISNDIKTPMNVIMGMTAVGLEESDHPEKMVECLGKIDTASRFLMGLLNDLVDVSMIELGRFRLHPKPYALEDFMEAIRDMTEPECAKKGITFYMSGGENNLNVMVDPIRLEQLFFNLLGNAVKFTPEGGEISFRVCNYAVHSGTFSADYVVADTGIGMSREFQKLLFEPFTQERRDEAERRHGSGLGLAITQNIVQQLGGSIAVTSAIGEGTKVKVHLDLPLADIQPQKEVARGGGSRQAFAALEGKRVLLAEDHPLNVEITRKLLERRGVEVVCAEDGRQALELFMERKEHYFDAILMDIVMPKMDGFETARQIRRVPHKDAQMIPIIAMSAKDAREDMDACKEAGMNDYLAKPVEPQRLYQVLAEYLENPMMKESIDCPKLVEQSKKVQKGQHWLVELLVFVTVYIIAAFGEMLILLPGELVLLNTNTAYQDAAASGDMEQLSEVSVQIAGSDAYAVLKLFSGIAMLLVVVLFCRKFQKRSFEMIGFVKEHALREYAIGLGLGVVFAVVTGGIAVAAGNAKLFTGTAPGMLVLFLLGYLIQGMAEELLYRSYLMVTIARRYSMTVAVLISAVIGALPYAAGAVEAPLAFLNGMLFGIFAALYLIRRGNIWGIGAFHAAWSFVRDIVFGTPDQVATVVVLLVGMILVGGKRPWGKAESCCMSRNKHQPAEEMSRKIRVERCRKFLHRSIFYVMISAEKRRKQAVFRKMKCRSGQTEAHTQDGRLRMKKKWWHDKVAYQIYPKSFLDTNGDGIGDLRGIISKLDYLKELGIDIIWLSPIYKSPFVDQGYDISDYYAIAQEFGTMEEFDELLAEAKKRGMYIVMDLVVNHCSDQHEWFKKALADPDGEYADYFYFVKGKDGREPSNYRSYFGGNAWEPVPGTDKYYLHMFAKEQPDLNWENPVLRQKIYDMVNWWLAKGLAGFRIDAIINIKKDTAFPSFPPDGGDGLASCVKMVEEVQGVGALLEDLKHATFEKWDAFTVAEVFNMKEDELPEFIGDDGHFSTMFDFSAHELTYGEHGWYDSKPIEFKKWRDTLFASQLKLQKAGFAANIIENHDEPRGASRYLPEHARNEAGKKMLGTTSILLRGIPFIYQGQEIGMTNCIRNDISEYDDISTKDQYQVAIDAGCSREEALRCCYENSRDNARTPMQWTDDENAGFTDGTPWLAMNPNYRQINVREQEARTDSVLAYYRRLVHLRKADAYRETFTYGIFEPAYQEMADVFAYYRVSGESGQRILVAANFGTDAVSLPLAYPCRQVLLSNLRAESAVEMACEKANALTLESCEVAVIELGMNRTSLPAPEQKEHARHGEQLFPLQKYITTLDDLHPSVSAHWHEEAEFTRILSGSGTYQIQLQHYDVAAGDLLFIPPALLHAITVTPREKLCTETYVFHMHFLGASTADICSVQYLTPLATAKLIPPFFFDARHPLHDALDDLFNDMDTLHDDAAQGYELLLKADFLRLIALLLPCCNAADEDTRLHMEYTAKLKTVLEYIDAHYAEELSIADLAFLCYFSEYHFMRFFKRFMGTSCLNYIKNLRLEKAAELLGQDGLPPLDASLSAGFHNLSYFYREFRKKYGVTPGNFRGAGAREKMFELLSALFLIAESNEFRLARFYHVCEEVCLVLLGSPLIVCGFVGHIRGLFKRGKDTEMQKNLQTRFSTRQYMLSRDFELYYYNEHYTSKVDTHTHDYYEFYFFMEGDVSIEIEGQRYPLRYGDMVVIPPHRRHRAVVHNHAQAYRRFVFWVSREYAAQLMELSLAYGYLMQRAEVSGKNVFHSDVITFNATQFKIFQLIEEMQMERFGREARIPLLVNDLILHLNRMVYEEENPAKVKEQDLYQNLIYYIEEHLEEELSLEKLAGAFFVSRYYVAHVFKEQAGISVHQYILKKRMQASREAILGGENISQVYERFGFRDYSSFYRAFRREYGMSPKEYREERLRMEMTLRWYGSKFDTVTLEQIRQIPGVTGVITTLYDTAPGEVWSRERIAALKAEVAAAGLHIAGIESVNVHDAIKTGAPDRDLYIDHYIETLENLGKEDIHLVCYNFMPVFDWTRTELARKRPDGSTVLAYTQEAVDALDPEKMFESIAGDTNGSIMPGWEPERMAHIKELFAMYKDIDDEKLFANLKYFLERIMPVCDKYDINMAIHPDDPAWSVFGLPRIIINKKNILRMMSMVDNPHNGVTFCSGSYGTNLENDLPDMIRSLKGRIHFAHVRNLKFNSPTDFEEAAHLSSDGTFDMYEIMRALYEIGFDGPIRPDHGRMIWGEVAMPGYGLYDRALGATYLNGLWEAIEKGAARYEAKMKLNNKGLENKNAWEAAGYALPQYDREAVAARTKQNPFWIHFGAGNIFRAFQANVVQDLLNKGDLDRGLVVAEGYDYEIVEKMNHPHDDYSILVTLKANGTVEKTVVGSVMESLALDSEDDAQFSRLKEIFSAASLQMATFTITEKGYNLYGSDGNFMPAVAADMAAGPQKPASYIGKVASLLYARFLAGEKPIAMVSMDNCSHNGDKLAAAITAFAEGWVKNGLADEAFETYVKTSGKVSFPWTMIDKITPRPDASIEEILKKDGVEELDPVVTSKNTYVAPFVNAEECQYLVIEDNFPNGRPALEKGGLIFTTRETVDKVEKMKVCTCLNPLHTALAVYGCLLGYNLISEEMKNPSLKKLVEVIGYKEGLPVVINPGILDPKEFIDTVLNVRIPNPFMPDTPQRIATDTSQKLAIRFGETIKAYAAAPSLNVADLKLIPLVFAGWLRYLMGVDDNGNAFTPSPDPMLAEASSYVADVKLGEAFDAKKTLAPILSNAKIWGVDLCALGMDTLVCDYFTELTAGTGAVAATLAKYTAMVSILEYDKEYEEKKLRQAEYKAGEQAGLKKGEQAGLKKGEQIGMNRGLAQGIVETGCAFGMPKEMILNRLQERLHISAQRAQEYFAMFSGQQPVMNVLILSCNTGGGHNAAARAVAEVFRAHGDEAVVLDYLKLAGEKVSRTVGNVYVETVKIAPGLFGLLYKIGMLVSRLLRRSPVYYVNGKMAVYLAAYLKKHPADVIVMPHLYPAETITYMKRKGMKLPLTVAVMTDYTCIPFWEETDCDYYMIPHESLIPEIVKRGIPEEKLVVTGIPVAAACSEPWSGMPEESAAADTHTHSIVRKNAQQAAKKSLGLEEKQRYILVAGGSMGAGSIDRLIPALLRRMQREEHLILICGSNQKLEQRMRARFGRDARVTILGSVSNMPVYLRACDIIYTKPGGLTSTEAAVTEISIVHTKPIPGCETKNRSFFVKKGMSVTAYTEYGLVRKGMQLLHNSGKKNAMQRAQCQGMEKHSAEKIYQFVKAKIMSSYLGFVIGGYLLGSILFAYVLPKLTRHIDIREMSEDGNPGTYNAFRYGGTVCGICVLLLELLKGFFPVWLCERTVGLQSPWFAAVMAAPVLGHAYSVYHRGRGGKAIAVSFGVLLGLVPAGIWQPLAMLVLFYLLFSLLLKIKSHARRSVVTYLCFAAGTCLTVKERPVLMGSLLIAGTVIYRHTFGCLGEEKNERTDFIMMLTSVTGINWGDEGKGRIVDLLTEKADYVVRYQGGNNAGHTVVTDQGKFVLNLLPSGILHPTAVCVLGNGMVIDPDHLRHEIAMMQYMKVKVDASNLKISDKATICMPFHVRQDVLEEERLSKTGSAFGSTRRGIAYAYGDKYMKKTLRMGDLLELDAPSVQHRLKVIIDSKNLVLENVYNQEPLSYDEIMEWCRSQAEFFKDYICDVGTLLGAAAGQGKNILFEAQLGALRDIDYGIYPFTSSSNTIASYAPIGASIPGCALDNVVGVMKAYSTCVGEGPFVAETAMGEAWNEKLRESGGEFGAATGRPRRVGPFDAVASRYGIRCQKAQDIALTKLDVLGAFDKIPVITGYRLHGVLLDSFPTDSRLEEAEPVIEELPGWECDISGCRSWKNLPENARKYVCTLEKLVDHPIYLVSTGAERDAYLLREMKKSMPRIGMRIIKTSIAAFLILLIFTAVGAKRSPFYVLITTIICIQPDIANTKDTAFNRAIGTLIGAVTGAVAMLLEMPLKGLPGGELWWDLLNAVMICITIYLTVLLGKQYIAFMACVAYLSVAVIAHDGVSPYEFLFYRVVDTFLGVGIGSLVGSFHTHGKKRNDVLFVAELDDELRSAHRQISEFNKTALNHMIDEGALFTMITRQTPASLIAEVEHLKLRLPVIALDGAVLYDIYQNRYLHACLMEHDMGIRIRQLLTEQNRAFFTNVIVDDVWVIYYNDLVDEDQKGYLKKLRTSPYRNYMKRAPHDEDHILYFSVLDTHNRLIMLEKQLEEMGFAGKLKFLLEDHVFGEKSLLKILSIEASPRNMLDRLMKMLHVHHSIVYGDKDSETCCDVAVADSDFNRIVQNIRADYTGRKRKTRVSKKLEDIRNMATIFPREEKAEQLFEKILENPDACERLKDTFYEHFPESEDMDAQMPAVSPQTFTRALFQAYQNKDLSAFLMAICGNSMFDLLRNSFLIPIRFNDKGKTNPILLTDDQGILREKLPVNVPDKVYQKFSRIYQHREPIPQMREYLAYGFREEHRYGEEDLSVESVEIGRHLGILLLYAMPEHLQEHLTDAQVYVHVWDALMRLQDVLPRAFMYYGKMQVNGQETGSEELGIFLPLRHFGDAMERNIEQADGIALGFREEMERYVRSVMKKGNFTGCLAQVLPEKQMSEAFINSIFLAMSGGFQDAYTYFTRDKVFSNAQTGNVVLMSQHFMMGEWKDGLKYLLPLLAFAFGVLAAERIQAQFRFARRLHWRQGILLLEIAILLIVGFLPQTLNMTATILVSFSCAMQVQAFRKVDGYSYASTMCIGNLRSGTASLSMYFRERRPEFLKQALYYFGIILFFALGAGAGGNLSVRYGVHVIWVSGGLLMVSVLLMFLEKLRAWNRMTLDYYRIFYYVAQYQSFSKAAEILGNNQPNLSRCMNLLESELGCKLLVRTNRGVSLTPEGQRLFEHVAIANEQLMLGEQEILKDKSLESGLVTIGASETALRLFLLNKLELFHHNYPHVRLQISNHSTPQAIRALSHGTVDFSVVTTPIDIKKPLHKTSLLSFREILIGGSSYAAIASRMQSLHDLSEVPFISLGAGTGTRELYSQYFLSHHLVFSPDMEASTTDQILPMVAHNLGIGFYPEALASEPIARGEVLPIRLVEPIPEREICLIRDTSRPKSIAARKLMEYLQRDTMDMLWREYYIPLILLSMGSGGGRAYCGSRRAEQPAFLQEGTIETTGAGDTFGAHFVPEKSTMEYEKLEGRRQFEEADDCILKVITVNEAYLRKLPYAAQTYAGVSDRVISMPWLRLPNRGTLYTGAMGLPRELSVVRLDGEKYLAQSLPREWRENWVPVDLTEMETGDRLTAEHLIAQGCRHLIHISGVHETAMSADERAAGFCEVCVQKNVQYQVVGTHAYEYNHLEYHEVLEQLLLQHPDTDGIFASSDLIAAQLLSFDPNIREPLWRSLEETKRQTAYGMEVCDVLKISDNEIRWFTGEEDFDREWTCFGGNTTFLMSKFMKTLCKIAIPVTLQSMLQASFSIVDQIMIGQLVETNISAVGLCGNFSLIFSVVIGAVSTVAGILIAQFIGAEDTKEAWCSFDVSLISGMVIAALFLFAAGVFPSQILGLYTRDVSIVNTGAVYFRIVAFSYIPMAAGNILSSWLRCREHATIPFWASFGAVAVNTGLNYLLIFGKFGLPCMGIKGAAIATLISQLFNLVFIAVGFALCIRKDEDKPVWSLRFSKITIKDYLIMIMPILVSEFLWSLGQNVESAVYGHLGMANLAAYTLTCPIQGLIVGALSGLSAAAGVMVGKRLGRKEYDEAYTESKKIMYAGLIGAAAVSILLILLAGVYTGLYRVDDSVKELGKILLIVFALYAPVKVENMILGGGIIRSGGNTKIIMVIDIVGTWCIGIPLCLLAAYVFKWDIVGVYTLLTTEEIFRLVVSLVIFKRRKWMISLSMAQDRVRIADVADSLGLSTATVSKVIHRKTEKISDETVKRVQQELERSGYIPNMAAILLARNNSRIIGVVVNDNEKYEGRVLEDGFVMASINALSHEVNEKGYFLMIKTTSDISEIPVFASMWNMDGLILMGFCEADYEKLRSQMRISFVVYDGYFEKCSKVVNLVINHYDGGYQAGRYFRELGHKKALCIADNFICMDKERIEGFIEAFEPGETLRWKIPRTEKERMRFYEDKYQTLLEKHVTAVFAVSDFYALEFMRFLQGKNIRIPRDIQIIGFDDNMASRESHPSLTTIHQEASLRAETAIKCLEAMRDGAECETKIVLPVELIKRESTGELMNKDFGCCCGFLADMIMKYAPEIKDAYNIDTLQQCRVFFYYRKFIGSPPCKRWTYFITVCKRQECNFCHGLCTMLYFFYDMMLYRILFLRKCRWFPFQKRYGDKKCQKFGIRHCMEYIRVTKENLEKEHICCAISDNKDIQVSSKKAWLADRFDEGLVFLKSVERGKCFIEYIPAECAWNPIEAPGYMYINCLWVSGSFKGHGYSSDLLSKCIEDSREKGKEGLCILAAARKKPFLADPKFLKYKGFEVCDEADNGIQLWYLPFEEKTEPPVFKECAKHPHINERGYVLYYTNQCPFNAKYVPILEETAQKNGIPFKAVKIESRKDAQNVPTPITTYALFCDGEYVTNEQMNDKKFLKLVGRMTFDYKKEYKEFYMPKGTPSIVTVPKMNYIAVRGSGNPNDADGEYKQAIGLLYGIAFTIKMSKKEDHQIDGYFDYVVPPLEGFWWQGERRPGDAMLRTDRADRRDGVSGIDYARKEDFKWISVIRLPDFVTRENFDWAVRKATAKKKQDFSKVEFFSYEEGLCVQCMHIGAYDDEPATVDAMHRFMEEQGYTLDITDQRMHHEIYLSDARRVAPEKWKTVVRHPIRRAMFVGFLFTENFFVDIINMTYRCRVVLDMICMESGIMKIDRLIGILSILLQEEKTTAPELAEKFEVSRRTINRDIEDLCKAGIPIRTAQGTGGGISIMDGYRMDRTILTSKDMQMILAGLRSLDSVSGSRYYSQLMEKIQTGSSEFISGRDSMLIDLSSWYKGSLAPKIEVIQSAIENRRIIRFKYYAPSGESNRRVEPYYLVFQWSSWYVWGWCLERKDYRLFKLNRMDCVVETDRGFLCRDVPMPDLSNEKIFPGGIKVKALFTPNMKWRLVEEFGPNCFTETDDGRLLFSADYTDMENLVTWLMTFGAKVEVLEPKEARDIIRRNAEETLKIYGGLGKMKKTRCYIYARVSTAIQVDGYSLDAQKDKLRKYAEFQDMEIVGEYSDEGHSGKNIKGRQEFMRMLNDIEDGKDGVDFVLVFKLSRFGRNAADVLSSLQLMQDYGVNLVCVEDGIDSSKEAGKLLISIIAAVAEMERENIRVQTMAGREQKAREGKWNGGFASYGYKLENGELVIAEDEVVIIQMIFERYIHTNDGINGVANYLNNHGYTKKLRQNGTIPGFSSSFIKKIIDNPVYMGKIAYGRRRTEKKTGTRNETHVVEQSEFPVYEGIHEANLDVTDIHYDKKFQICRDDMKNLVKDTIHANGIDIGIYTQDFENEFISLTDIARYKSDEPKDVIKNWMRSKDTIEFLGLWEKLHNSNFKGVEFDSFRNQAGSNAFTMSPTKWIETTGAIGIVSKSGRYGGTFAHSDIAFEFASWISAEFKLYIIKDYKRLKADENSRFSLNWNLNREISKLNYRIHTDAIKEKLIPPELTPAQISFTYANEADMLNVVLFGRTAKQWKDENPDIKGNMRDGATLNQLLILANLESYNAVLIHQGKNQKERMELLRQLALQQIRTLESISTDKLPRLRMEKVITLEEALKRIEELENENAELREELEYYKNRKLSGRQKHNAKWMAIYDDFVAGYESGMTMVEIARRNNVSERTIYRYKAYYDELKDKNEMESKMRKKYYEDAKENAAFERCADVITSLILKYGPALKRKWNLNEWIRNIQAESLWKDIACKRYQRYFIHMMNMKSVHAMNLMNLGNKKVNKMLKELEEHGLIYRRHQGLGRPNKIMKTISRIAYSNDKRNRTRSILIMMAICLTTMLLVIISTVGNGVIHLQKSQATGSYGSNYGLFVSADGSQLKEVNRRAEIDATGTMCTEGIIKGNEKGGFVCMDETARKMLPYNKEYELKEGKYPEKMQEIAAGEAFFRAMGYGDVKIGDTVTLDYRAGMQSEYKPEEFVVSGILYDRDEYTIEASYVAFGSQEFYDEHVAENDRQYNIYFTLNDSANVSMNNIDSVIKQIAAACGIEEKNVIVNDLYLQWVLQPSYETIAVCGVLILAIVLFAVVVIYNIFQVGIANKIQEYGKIKALGATKKQMKQLIFREGIFLTFFSIPVGLLFGFLIAKCGFNWLVEQGNLVSTGTGSMGVQNQQVPLFSLPVMLLCIFVSFFTVALALRKPMKIVSRISPIEATRYLENAETQKKGKRNGRKNVTVFSMAMANVTGNPKRTIGTILTMGFSCVLFVIISNYVGNIDTEHEARLSVNHGQFELQLDYSAEYDERYPENNLDTILTDDPLNDSLIEEIKSIPGVTDVMTREIVSVNLNGTRFPATIVSKKDFDFMRQDGDIGSMDYDQAVKNGDIFFGWSTWMEQDGYAPGESIAFDFENGSGTYTYQGKIAGSFVSADTYLVIPEGVYRSMNPRGTAYGYLWVDCDKKDVASVEQSLNTLISNTSHIKMDTYHAQLQSAEFASSMMKLGCYLFMAIIGLIGFMNMANTMIMNITTKKQEYGILQAVGMTNKQLNLCLQLQGLMFTVGTICVALIIGLPLGYTLFSYAKHNGIFGMNIYHVPIVPIFIMIFLVGLLQIVLSCVLSSNLKKETLVERIRYQGMSVILETKQLCKFYGAGENQVKAVNQVDIQIEQGEFVAIVGKSGSGKSTLLHMLGGLDTPTKGSVTLAGKDLYRMKEDALAVFRRRKIGFVFQAFNLVSSVNVWENIVLPLGLDGRKVDEAYVNDIIATLGIENRIYNLPNQLSGGQQQRVAIARALVNRPEIIFADEPTGNLDSKTSDEVIALLKMTAKKYGQTIVMITHDDEIAQVADRILVIEDGQVVDFRMTKRYHRKLTSALSLALPVILVFAILNCFTTYVFYEDYKYKMNLMTKIAAKEEFSGLDAVSELLKDKDIETNEQGRRLLEQYGYWGNKGNAFYMQFRHQVMVTGAVSTVICVLLLTFLLYWKKKEDACHQKILDQLEEILIRFRENKFDALLKTENPAELEKLNDQLEAIGHHIQLLKEEARAEKESTKEMVSDISHQLKTPVAALDTCFSVLMQNDLSATEQEEFRIRCRSALDGLETLLQSLLEISKMETGLIQINKKKLPLMDTVISAVNCTYPKADEKEIEFVFDYAKELETCMVMQDKRWLGEAVINVLDNAIKYSPDGSKIFIRLQKRNDLVRMEIEDQGIGIPQNEYHKIFQRFYRGSSRKVMEKSGTGIGLFLSREIIEKHGGTIMVTSGKKKKGSTFVIQLPYVGMPGILVVEDDENLNRGITFSLKKSGYEVFSAESVKKAKRIASDNNVDVTICDVNLPDGNGLEFVRWIRCNYNTYIICLTALDQEMDQVMGYEAGADDYITKPFSLSVLLLKIEAYFRRRQEKTEAGKMISGDIVFIAGEMKVQIKSREISLTKTELKMLTFFLQNPKKILSKTQILENVFDLEGDFVDENTIAVNIRRLREKIEDNPAAPVYIKNIRGLGYIWNQEVRQMAGREQKAREGKWNGGFAPYGYRLENGELVIAEDEVEIIQMIFDRYIHTNDGINGVANYLNNHGYTKKLRQNGTIPGFSSSFIKKIIDNLVYMGKIAYGRRRTEKKTGTRNETHVVEQSDFPVYEGVHVAIIAEEDWELAQEKRSKNNYRREKIHDPEHAHILSGILKCPCCGKEMYGNIAKAGRKDNKTRYYYYCKNNVNATGHKCTFRRNIEQSQIDDMLAKLITAMTKEGKFKDAIQDKIGATVDTTDLEKQLSVLNASLHQAKTIKTRLEQQMDNLDVTDTHYDKKISDLQRRLDAQYDRIDEVEETMAELKSQIYELKKNQIDADSIYRFLGAFNEVYSECTDAEKKQFMQAFIERIDIFPERREDSNWIQNIKFQFPVPIIKEGKEVAQIKGISLDKEKSDEHMVSLEKLSTLETVVLLPQLKQKSDDYINVTIELDDMDITSAETKATYDEIKKYVAEHNAGMKVSNLYISQVKRKCGIEVGKNYNLPKNEDSRQPQCPEDKESAIVEALKHFKMNSMKKNTKCYIYTRVSTVIQVDGYSLDAQKDKLRKYAEFQDMEIVGEYSDEGHSGKNIKGRQEFMRMLNDIEDGKDGVDFVLVFKLSRFGRNVADVLSSLQLMQDYGMAEDKKKEIDVAVIEVTEEYLKEKLYKIRGKRVLLDADLAEIYGYDTKGFNRQVKNNIEKFDEDFMFELTDEELEDLRYKNCTANISSKSRYNPHVFTEQGLYMLMTVLKGPLAVKQSKALIRTFKKMKDYILENRDLIGQREILQLSMETANNRIEINKINSDMISLEKQISDVAEGLKDVVTKSELADMMNSFVSDDDEKWLMFNAKFSSADEVYESIYKQAKSSIYVVDNYIGLRTLVHLKNSPTGVNITLFSDNVGNNKLHNIEFTDFCKEYPSVKISMKKTGGIFHDRFIVLDYGTADERVFLCGASSKDAGARITSIVEDYGISKYAPVIATLLKNPTLILPHMEKSVTLEEALKRIKELEKENAELREELEYYRNRKLSGRQKHNAKWMAIYNDFVVGYESGMTMVEIAKRNNVSERTIYRYKAYYDKMKKKEEMRKRYYDDAKENAAFERCVDVVTVLILKYGPAIKRKWILRDWIKNTQADCYWRSLACKRYQRYFDCMKAFVKNDTTMENTKYDDKFYRLPKRLFKEDQFRSMTNEAKTLYMILLDRRCLSECNGDAWRDEYGAIFIIFTIKEMMKLLHLGNKKINKMLKELEVYNLIYRSHQGLGKPNKIYVYDLLKADNDNWLPKQFKHRKERTNEKEILMNLFSQIFYADSVYPRCWKNFLFVIFSNIMDKTGKELLFISMHTKLTIPERLKDLRVSEKRMSLQELSDATGIPSSTLGNYEKDENIDMSLSNLITLANFYNVSTDYLLCRTELRKHKNQSASDLHLNDDAVQILTDEKYNPRLLSELLTHENFRKFMTDLEIYIDGFNDKGVQIANAFLDVMRCKLTELGADSTDTFASVFDNSHIESEQYYMNILSADLKPIVSDLRNAHMKDSNTASDIDYRSIVKNIIDDFTSQIHTTADDDTESSNDAYINGLLLLFCKNLEMKVPQLSMEEKRILKEIFSRSKPAKEHRKLRRRNPKLMKNNETKKRKSGFNPNRGCYFTADGKYYCYERWDDEKKCIVHHKLEVGKDLSLEPTIMLDVYDHEMDLQDRYEDEQLNPLFDTKVVNYKTKNSMGRDDYMEERVKRAVKKYGKTLWHYTDINALCGIIGKKEIWFGSAEHMNDREELIGFINDLEKEVYACIDSANKEKANDVFGQIKDRLQKEYPYIFCVSKARNDAAQWDRYACGGQGVAIVFNTATLFKLIFYNQIIMNEEYYGYCAKQHKMKELLRDYIQYDKMDDFSNLNGLIDNLLLCAMLHKHESFSTEQEIRISPLFVNENDKHLQCKILNTIRRVYILNLIELCEKEGIDFEDLFDSIVIGPTSKQTVRDLQFYCKNNGLLKLANKVKKSDCPLRMIFDKESDFEEAVIGVLIERGWESEVIRHPSEADLLKNWADILFNNNRQRNCLNECPLTDGEMQQIMEQIINLRTPLKLNSFINGRSVSVIRDNPDDELHFGKEVSLKIYDRQEIAYGESRYQIVQQPHFNTKSPILNDRRGDLMLLINGMPVIHIELKRSNIPVSDAYNQIIKYSHEGVFRGIFSLIQVFVAMEPEEAVYFANPGEDGVFNPAFFFHWADFDNVPINEWDKVTAGLLNIPMAHMLIGFYTIADTDDNLLKVMRSYQYYAAIGIADRVTKRNWKEDTPETQRGGHVWHTTGSGKTMTSFKSAQLIASSHDADKVIFLVDRKELGIQSLKEYRSFATETESIQATENTDILISKLKSDDHDNTLIVTSIQKLSNISEDMEGLKDADLKKIRSKRLVIIIDECHRSTFGDMLTTIKDTFKHSIIFGFTGTPIQDVNIKKDSTTTTIFGSEIHRYTLADGIRDKNVLGFDPYMVKIYDDDELRQKVALEKAKADTVEDVMKDEKKKKVFYKWMDSSQVKMYGKKVGDKWVKGIEDFIPNEQYQTDEYVMGIISDIKKKWLIYSRGGKFHAIFATSSIPEAVRYWRLMKKEIPELMITAMFDPTIDNERGTGSLDKEDGIVDMLEDYRDRLGQTFTIPTYDKFRKDVSLRLAHKKPYERLEPNQQIDILIVVNQMLTGFDSKWVNTIYLDKVMEYENLIQAFSRTNRLFNESEKPFGIIKYYRRPNTMEKNIEAAVEAYSGNVPTGLFVDKLPRNLRNLNRTFEEIKEIFDAGAINNFEKLPEEQSEKRKFAKAFNQFDTYLQAAKIQGFNWKQRVYSAEDGTDIEMLFDEMTYLILLARYKEMAGGGGGGHGGDVPYDVKIHITEYDTTKIDAEYMNTRFEKFLKLIQGKYDQETLDKTLTDLHKSFSMLSTEEQKYANVFLHDVQAGNARIIPGKSFREYISDLMKGAENARIKRVVRRLGCYERLLREMLAKKVTKETIEAHGKFDELKASVDNSKATEFFIVVEHQNFRQSRLAMLVDAYLRYFLLSGGQDPYPENEFDRKHKTKVETVSMDTDSNSKPVGVVLTDEVMEGKTITTSVKKAKLKEWYSESKALACMVDTDCFAYVDNKLCVYDKKYLERDDKGKLFFTEYAKAHEEECFLQFVMDKETGELHYITLPSSMASKTFNYYDELSALSDDEKLSLGLVNEIAREMLAAINGMEFGEALATLMDKKICNVSFRTLKSVTGLDNTTVSNMKKGKNLTKENVVSCCLGIHIPFRLSNRLLQLAERPLDLTLPGAKGEENTIYDQILHLYWAEDYSDTYAELVAIHYEHLIHQPPIKMKENRQSPEIRMEGFEDDWIYNNLRKLAIFNPKTEPPEEFEYVDLESVVGTEMMYHRKEKRDTAPSRAQRVAQYGDLFYQTVRPYQKNNYLFEKEECYVFSTGYAQIRPFAADGYFLLSLVQNNSFVKKVLDNCTGTSYPAINANDLADIKIHYPVNYSEQERIGCWFRNIDLFISLHNKEIKRLECLRKAMLEKMFPQNGADVPAVRFGQYKEPWRLCQFSEIFKERHIIDTISDEYPQLAFTIEEGVIRPEDKKTNKRDFLIIDKANKKYLQTEYDDIIYNPANVIYGAIHRNALGKGCVSPIYKIFYTDQDSTFMECIVRHPRFIKEISRSMEGTVKKLRTLKPKAFLEKRAYIAPTIEEQQQIGEYFRQMDRLIEIEKEKLEKIKHIKSACMEKMFVMNKHQLASTIWESANQMRSKIEANEYKDFILGFIFYKYLSERELDLFQKEKLSEDEIKKVDEKDVKYAKHVRETLGYFIAYDNLFSTWLAKGNDFDVKDVRDALSDFDQNIDEVYKKVFEKIFNTLQTGLSKLGETSGSQTKAVKKLLKLIKKIPMDGKQDYDVLGFIYEYLISNFAANAGKKAGEFYTPHEVSVLMSEIVAEHLKDRKQIKIYDPTSGSGSLLINIGRSAAKYISGDGKIDYYAQELKENTFNLTRMNLVMRGIKPANINVRNGDTLEDDWPFFEENKKETTYKLVRVDAVVSNPPYSQKWDPKDKEFDPRYKDFGVAPKAKADFAFLLHDLYHLEDDGIMTIVLPHGVLFRGGEEAKIRENLIEKNRIDAIIGLPENIFFGTNIATIIMVLKKNRPSSDVLIIDASKGFEKSGKNNKLRASDIKKIVDTVKYRTEIDKYSVLVSKETVKENEYNLNITRYVDSTDDPEKWDIRATMFGGIPVSEVDAFEKYWEAFPGLRDALFKEVSAGYLQPRTKDIKGTIDSFESVEAYRVTFTKAFVGFYETLKEDLIDGILDVSAEQEKEKITEDIFGRIDRVKLADRYVAYQVFAKYWDIISADIEMLQTEGFQVITQVDPNMVIKKNNKNDDDDEVTEVQDGWKGHILPFELVQEILMPDEIEAIRVLEERLSEIAEEYMEIIDSLDEDEKQGSFLNDSNDAFVSKELKSACDEILQEVESDEINALNKYMSLSKKEALTFMKSCSDADWNHIEKNKDGSCKKPSLTSRIQQLKMEFEFPEESLDGKLLSALRLMDEESSVKKDMKQKKENLHIKTKEVIEGLSEEEALKIVEQKWIAPLVKDLEDISSAIIIDVIGKMEYLAEKYATTMHDLQNENISIKNSLASLIGSLAANGSDKEGLQEFKLILGGQVMTVNVKEENWVGTKEAAEFLGVKPATIRDWIRKGKDIPRMKIGKAWKFKYSELEEWARSGRAADKMKKNDSIELKIEDMGVDGEGIGKYEGMTFFVKDAVIGDTIRAGITKLKKNYGYARVQEILEPSPYRVQPECPLYARCGGCQIQAMDYRQQLCYKQKKVRGNLIRIGGFAPELIDSVMEEIVGMEQPYRYRNKAQFPIGADRDGMPVAGFYAARTHSIIPVEDCKLGVTQNEQILGTVLSYMRENGVRPYDETTGKGLVRHVLIRYGFTSKELMVCLVINGETLPQEKKLVDALCKIEGMTSISVNINRKNTNVILGEETRTVWGSDYITDQIHLRDCDHDFALTDTAIAYHISPQSFYQVNPVQTEKLYSLALSYAGLTGRETVWDLYCGIGTISLFLAQKAGKVYGVEIVPQAIEDAKSNAVLNGITNASFFVGKAEEVLPEFYEKESRKPDADMLHPDVIVVDPPRKGCDEKCLETMLRMEPDRIVYVSCDPATLARDLKILCGGGYALRKVRPVDQFGHTTHVETVVLLSKGTEQSGTENGRQQKSEGGLLPGGYGFIMKYIESLREGERINEIYLCKVKQSALTKAGKPYDNLILQDKTGTLDAKIWEPGSVGIDEFDSLDYIAVMGDITSFQGNLQLNVKRVRKVQEGEYDPKDYLPVSKKDIDEMYTELLGLIASVKHPYLKKLLESFFVEDKDFEKRFKFHSAAKSVHHGFVGGLLEHTLSVTKNCDYFAETYPILNRDLIVSAAIFHDIGKLEELSTFPENDYTDEGQLLGHIMIGAEMVGERIRTIPGFPKGTANELKHCILAHHGELEYGSPKKPALAEALALSFADNIDAKMETIREIFASVPENNLEWQGYNRLLESNIRRSGRESMQQKDNDQFSFINEKIKEKPVNKKRLLMQAGFIALMAVVFGIIASLVFAYFQPKFESLFYPEEEPVVTIPQDSVAVTELTEETETSEETEASEEPQAPSEEPPLQQPEELEIADVQNVQNKLYAVGREANRFVVTVTGVKSDTDWFNNSYESRGQASGIIIADNGQELLILTERKVISDAQEVYVTFINDVTVEASMKHYDGNTGIAVLSVPKEQVDTDTMNAISVAKLGNSLTTMQGTMVIAVGSPLGTNYSILTGNITSTNNVISTIDNNYTVFTTDIVGSSSGSGVIINVNGEVIGLVMQDYGNEEDQTTLTAISISELKQLIEKLSNNQDIPYIGLELTTVSAATAKEYDIPKGAYIKDVKMDSPALAAGLQSGDVITEMGGEAVYTVDSYESKLLALEPGDEVEIVVQRQGAEKYEEITCTVQVGVLKMNEKVLHTLEYNKILDQLTEYAFSADARSRCQKLRPITDRAQIEQLQQQTSDALSRLFKYGSLSFSGVTDIRDSLKRLEIGGALSAIELLRVCSLLESAKRAKAFARSQDDSDQPDDSLTSLFAGIEPLTPLCDEIRRCILSEDEIADDASSTLHSIRRSMRGMNDKIRAQMNSMINNTTTRSYLQDTVITMRDGRYCLPVKAEAKSLVPGMIHDQSSTGSTLFIEPMAVVNLNNEYKELQLREQEEIEVILAGLSNLTASYATQLLADYELLTELDFIFARAAFAQTYNGVAPLFNDDGRIHIRKGRHPLLDPKKVVPIDVRLGEDFRLLIVTGPNTGGKTVSLKTVGLLTLMGQSGLHIPASERSELGIFDEVFADIGDEQSIEQSLSTFSSHMVNIIRILEQVNDRSLVLFDELCAGTDPTEGAALAISILSKLHLYGARIMATTHYSELKVYALSTPGVENACCEFDVATLSPTYRLLIGIPGKSNAFAISEKLGLPSDLITDAKGRISKSEGDFEDLIADLEKSRSTIEREQLEINQYKAEIESLKEKLEQKQERLDSSRNKILREANEQAYNILKEAKDVADETIRNFNKYGKAGAPVSEMEKERTKLRGKMDKAAQKMSEQKKASVPNHNVPKKLRIGDSVKVISMNLKGTVHSLPNARGDLYVQMGILRSLVNINDLILLEEDAAPGTKKFQKTSAGKIKMSKSASVSTEINLIGKTTDEAIPLLDKYLDDAYLAHLPSVRIVHGKGTGALRNAVQAHLKRLKYVKSFHLGEFGEGDAGVTIAEFKDMAAKQKILIVDDDNNIAELISLYLTKECFDTRIVNDGEEAMIAFDQYNPNLILLDLMLPGMDGYQVCREIRAKANVPIIMLSAKGEIFDKVLGLELGADDYMMKPFDSKELVARVKAVLRRYQPAKPEEPAAELKCVKYTDLVVNLSNYSVIYMGQAVDMPPKELELLYFLAASPNQVFTREQLLDHIWGYEYIGDTRTVDVHVKRLREKIKDHANWSLATVWGIGYKFEVRDLMKRTLYPKLLAGYLMYGLIGFLIITTFTYHITFAFVEKKEAASLYRESALISSNYAGNYFSKTMTLDEIQTQLSTLSTYLSSEIWIVDTRGSIILNTAAPGCDPTPVPGFNITDFGSRYYQTGTFYNQFTSEMLSVFSPITVNYKVRGYVVIHKPTSSLVSYANGLVAIAYETLGLLFLAAFVVLILFTYVVYIPIRKITKAADEYAAGNFEKKIDVHSNDEIGYLAASLNYMANELNTLEDDQKKFVSNVSHDFRSPLTSIKGYVEAMLDGTIPVEMQDKYLNIILFETERLNKLTKSLLELNKFGSHGTMLDITDFDINHTIRMTVQTFEGRCMEKRITFNLILTGEKLFVSADMSKIEQVLYNLIDNAIKFSHTDSAITIETTEKNDKIFVSVKDTGIGIPSDSIKKIWERFYKTDLSRGKDKKGTGLGLSIVKEIVQAHGENINCISTEGVGTEFIFTLPLAKKLSHQAGSMAVVTITNENFEDEVLAAKVPVILDFWAEWCGPCKMQSPVFEALSEELAGKVKFGSVNVDEQAALALKYQVMSIPMLVVMQYGIFKKKAIGLQTREEILDLLACCEAEMADLRKEIEKRRTFAIISHPDAGKTTLTEKFLLYGGAINLAGSVKGKATARHAVSDWMEIEKERGISVTSSVLQFNYGGYCINILDTPGHQDFSEDTYRTLMAADSAVMVIDGSKGVEAQTRKLFKVCVMRHIPIFTFINKMDRDANDTFDLLDEIEKELGIATCPINWPIGSGKNFKGVYDRNTREIMTFSDTLKGTKEGTEKHISVDDPALIAEIGQDAYDKLMEEIELLDGASAEFDQELVTKGELSPVFFGSALTNFGVETFLQHFLKMTYSPLPRKADIGEVDPFGEDFSAFVFKIQANMNKAHRDRIAFMRICSGKFTAGMEVTHVQGGNKKIKLSQPQQMMAQERHIVDEAYAGDIIGVFDPGIFSIGDTLTTAKPFKFEGIPTFAPEHFARVRQVDTMKRKQFMKGMQQIAQEGAIQIFQEYNMGMEEVIVGVVGVLQFDVLKYRLENEYNVEIRMDTLPYEHIRWIENENIDMDKLVGTSDMKKIQDLKGRPLLLFVNAWSVGMVLDRNEGLVLSEFGREMKRVFLIVLDSVGIGEMPDAADYGDAGSNTIKAASMSPYFSMPNMRKLGFFNIDGVEIGEKEAAPTGAVARMTEVSKGKDTTIGHWEIAGVISPKPLPTYPNGFPQEIIEEFSKKTGRGVLCNKPYSGTDVIRDYGEEHLKTGDLIVYTSADSVFQVAAHEDIVPVEKLYEYCQIARDMLRGEHGVGRVIARPFTGTPGNFTRTTRRHDFSLQPPKVTMLDQLSGAGFDVLSVGKIIDIFAEKGITEYVRTTGNEDGINKTLDYMKKDFNGLCFTNLVDYDMLYGHRNDIEGYAKALTYFDERLPELLAAMGEEDVLMITADHGCDPSTPSTDHSREYTPLVMYGAPVRAGENFGTRKSFSDIAATILSYFDLTPECAGEAIPVFKKMTENSYRFFSNRECQYYPCHEGIEEMNCLFCYCPLYERRHCPGNPEYIKSRRENGSEVQIKSCMKCTFPHQAENYDVIMQFLRKGDRMERGILVVSFGTTYQETREKNIDHMVALVREQYPHDLVEEAYSSSTVRKVLRERDGIAKDDVRQALCRMRDAGVRRVIVFPTHIIDGIENHRMKQEVTDCAPWFEDVRIADALLKTPEDYQRTAEALWKSVAAEAGSSPVIFMGHGSEHAADESYERLECVLAQVTENDVYVATVEGSVTIDDVIGRMKVSRHKSGRVLVAPFMMVAGDHANHDMAGEKDSFAAALREAGYEPVCLLKGIGEYEPVRECYFRHLRHCIGTLYGIGVGPGDPELVTVKALRCMEESDLIVLPAADPAGCHAYQIARKAYPGIEKKELVCLPFPMTKEEEKLRRAHEEIFARIASYLTEGKIVAFLTIGDPSVYSTYGYIHRRIAAWGGNVKMISGVPSFCAAAASLGISLGDNRDEIHVIPGSYEVEETMALSGTRVYMKSGKSLARLKALLEEQQKEKKLSVYCVENCGMADERIRLGAEALEENGSYLTTLIVKDEGEVVMEQRKKESGIRLEDVAAGYGRKSLLNHISLHVSPGNVLTLIGPNGAGKSTILKTVTRQLAELGGTIFLEGTSMSRMREEEVARTLAMVMTERLHPEFMTCREVVATGRYPYTGRLGILSAEDWKLVDDAMQLVHARDTADRNFSQISDGQRQRVMLARAICQEPRILILDEPTSYLDMRYKIDILSSIRRLAAERNMAVVMSLHELDLALKVSDVIACVEGDHIGKTGTPEEVFSGDYIQKLYGVDAECFDPRTGAVYLRGNKSRPKIFVIGGAGSGIPVYHALQRKNVPFAAGILMENDVEYQDACAAASRVVSVKPFFPVAEKEIAEARSWIETCETCVCCAEAFGPYNEANRALREYAKTLGKLIPVEAQQNLMKRYVIAFGAMILLLGGLFFFNIGSGSVKMTGSEIADILLHRFGGTADETARQIVWEIRLPRICAAVILGGALSVAGFLLQSFFQNPIAGPYVLGISSGAKLVVALTMIALLEMGRAISSLGMIVAAFAGSMLAMGFVLLISCRVKKMSMLVVCGIMIGYICSAITDFCVTFADDSNIVNLHNWSMGSLSGMTWSNVRMMTAVVAVTMGVTFFLAKPIGAYQMGEAYARNMGVKIRLLRVLLILLSSLLSACVTAFAGPISFVGIAVPHLVKTAMKTAKPLLLIPGCFLGGAIITLFCDGFARTVFAPTELSISSVTAVFLVPVVIVMMLRRNEDRMKKKVTELIVCLLSVICFLTACHTPQSEKLADGTYQADVTLTGGSGRATVDSPAAITVKDGKIYATIVWSSPYYDYMMVEDETCYNEAEAGENSTFTIPIEKLPCEISVIADTTAMSVPHEIEYTLSFALKETDFSELTKTGQWDLSYATQYRVEQYGEYDLITMADDSRFLLVPENVPVPEHVPEDVVVLKQPLDHTYLVSSSVMDMIREIGALSDIRLTGVKESDWYIEKAAAAMEDGRMLYAGKYNEPDYELILKEGCNFALENTMIGHNPEVKEKLESLGIPVMVERSSYEEHPLGRLEWIRLYGLLYGKEQEADAFYEEQLKKIEPIMEKEDTGRTVAFFYITANGAVNVRKPNDYIAQMIGLAGGTYVLNDRLSAEENALSTMNMQMEDFYAAAKDADILIYNSTIEGELYSVDELLAKSTLFSDFKAVKEGNVYCTGSNFFQESTGTCDFIEDLHKVLVDETDDNYRFLKHVRMKKKTLALLLSLTLAAGMIGGCGSKTETTTEENVQTAQTEAVAETGTETVSDQDAADHVAALIDAIYVQERTDETDAQCAEAKAAWDALTDAQKELVEGENADPDYFGRDTGDASKDDPLNEDEIGENEILVVSFGTSFNDSRTEDIGGVEKAIAEAYPDWSVRRAFTAQIIINHVQARDDEKIDNVDQALDRAVANGVKNLVIQPTHLMHGAEYDELMEAVEKYRDQFTSVAVAEPLLGEVGTDATVINDDKEAVAKAITAEAVAEAGYDSLDAAAEDGTAFVFMGHGTAHTAKVSYSQMASVMKDLNYANVFIGTVEGEPEETACEAVIEAVKEAGYTKVVLRPLMVVAGDHANNDMAGDDDDSWKSMFEADGSFESVTCQIAGLGRIDTIEQLYVSHTQDAIDSLGSVDTVAAATTAGDLEDGTYSAVFDTDSSMFHVNEACAGRGTLTVKDGKMTIHVSLVSQSIVNLYPGTAEDAQKSGAKLLEPTKDTVTYSDGTSEEVYGFDIPVEALDQEFDLAIIGTKGVWYDHKVSVSDPVAEMCRRCTDEPLYRLKGKQVGILYDLVTVIRECRYESFTPLARMRREGKMNIPRIMIAAAGSGSGKTLLSCALMMLFSQEGKSVSAIKCGPDYIDPMFHRTVLGVPSRNLDTFFTGERLTKSLFARAAEGADLAVMEGVMGLYDGLGGIRKEGSSYHLAEVTKTPVILVVNAHGMGRSILPVIRGFLDYDRHHLIRGVILNQTSVTFCETIRPEIERELSLPVLGCLPKLKELHWDSRHLGLVMPEEIADVKKQIQTVADTLGKTLDCGKLLAIAASAEALETDPVPKKKIADVRIGIARDAAFGFYYEDNLQLLREAGAELVPFSPLQDESLPEGIAGLILGGGYPELHAKALSKNIPMRKAVHDAVADGLPTIAECGGFLYLHETLCDDEGVCYPMAGVIPASAINTGKLVRFGYVMLTEKEENFLPAGAQIAGHEFHYYDSTDNGVGAVAKKPVNGRSWECVHESPSQWMGFPHLYYYSNPEYAYRFLKKAADRIYLKKMAEILIFSGTTEGRKIAEVLCGRQIDCVASVATEYGREVMRPREHLVIREGRMSEPEMEELMRTGAFLAVVDATHPYAVEVTEHIKESAKKTNLPYLRLSRSTAAEREIAEHEWMIHTVADTQECVKLLSSLPGNILLTTGSKELHAYAVREEIRKRLFVRVLPGVESIEICHREQIPGKQIIAMQGPFGTELNEALIRQYDIGVLVTKESGQAGGFPEKIRAAEHTKIPVVMIKNPEQAGGMSMEKVLSEIETLCGKKSGTKHQPLQISLVGIGVGNTKLFTGEAGEAIAQAEVVCGAKRLLAAADSLIAPDAEKREAYLPADLLPYIYSCREKGTVRIAILFSGDTGFYSGAEAVHKALQEEVRLGKLQAGITICPGISSLAYLAARAGKSWQDAKIVSTHGREADVSACVRSEKKVFLIVSGRSDLIRIGEELEAAGLSGVELTIGYQLSYKEEQIWHGTPEVCRTLKDDGLYACLIENPGAQGETLAPGVPDRWFVRGRVPMTKEEIRWLSLCRLGLRSQSVFYDIGSGTGSIAVEAALRSEQLRVYAVEHGEEACGLIAENATRAGVKNLVVVKGEAPECLGELPAPTHAFIGGSGGRLREILLALREKNPDVRVVLNAVSLETVAEVVALRKELLICDEEITQIAVSRAKKAGTHHLMQAENPIYVIAFSLSENGEGEEQKPDRREERMKYEIYIVGMGPGREEDMTQEALTVLESCEVIVGYTVYLDLLGERFSGKTFLSTPMRQEVERCRMCYEEAGKGKRVALICSGDAGIYGMASLMYEMSEEYPSCELTVIPGITAASSGAAVLGAPLNHDFCVISLSDLLTPWEQIKARLRAAVLGDFAIALYNPSSRKRADYLQRACDILLDAGAKETRACGYVENIRRDGETAHTCTLRELRETQVNMFTTVFIGNSQSVIMGDKLVTKRGYQIGTGAKARADERGMKKTDIAVISFTYRGAELAEHIQKVMDAAWSCKLYTKCSDVRADGIGIPVEQPLFTWAGEQFAAGNALLFIGACGIAVRSIAPHVKDKLSDVPVLVADEAGQFVIPLLAGHYGGANRLAGELSRALGATAVLTTATDVNGLFAVDVFAATNHLAIASHDGIAWVSARLLRDGYLTMSVAGECEGEIPPEVRLVPYPPKKPVDVLVAPQCEDVEQCSLWLIPSCLMFGIGCRRGKSEEELEAFVRETLELAKLSWAAVAGIASVDVKADEAGILALAERLAVPYITYPAGRLQCADGTFTSSDFVAQQVGVDNVCERAAVCAAGEGGRLLVQKTACEGKTLAIAERKWSVKFMVYFVGAGPGAKDLITVRGMRLLEQADVIIYAGSLVNPELLSYAGSGAKIYDSAKMTLEEVLAVIREAEEKGLTTVRLHTGEPSLYGAVREQMDVLAAEGISYESCPGVSACFGAAAALNLEYTLPGISQSLIITRMAGRTAVPERESIESFAAHQASMAVYLSAGMIKELSERLMDGGYAPDTPAAVVYKATWPDEEAYVCTVETLAAVAAEHQITKTALILVGDVLAAPEYERSKLYDPGFTTGYRKAKKGQGETDMRYGFTTGSCAAAAAKAAAYMLLTGREKHEITITTPKGILYHARMEEISRTEHSVRCAVRKDGGDDPDITTGTLIFAEVSWQEQKQEKDCGKPQILITGGAGVGTVTRPGLDQPVGSAAINHVPREMITREVEEVCALTDYAGSLLVEISVQGGEELAKKTFNPRLGIVGGISILGTTGIVEPMSSQALLDTIYVELKQKREEGNRFAAISPGNYGLQYMKRAYGFDLDRSVKCSNFIGKTMDMAVELGFEAVLLTGHIGKLVKLSGGIMDTHSREADARMELLMAAAYRAGCAPDTLGKILDCLVTEEALAYIAKDGCLSATMELLMKKILFYLKKRVKEKLRVECILYANGYGELARSDGAVELLERIRGEEEHLQMVQQNIHGGDIYRNQVSLDFSVNINPFGMPQRVREALEAAVAWCERYPDIRSEALRDAIAGAKGIAPADIVCGNGASELFPAILRAVHAKKVLLPVPSFYGYEYAAKSVGAEICCHELLETDGYAVTERFLTAIGEGVNAVFLAVPNNPVGTVVEPELLEKIAERCQKYGVTLILDECFVMFTGAEERYSFLKKYRNYPGVVIVRAFTKLYAMPGVRLGYLVCSDAALTEAIRADLPEWNLSVFAQQAGCVACGQRAYVEHSVAFVCRERAWLTEQLSEIGITVFASNANFLMIKDGRPLAKELLKKGILIRDCSNYRGLSGGYYRIAVRRREENERLLAALAQVTGSSVVENGKDDKKPAAVPDGIEYVMPQEIEKRSFSIIEEELQLRGITLPVEEAMVTKRVIHTSADFSYAQTMTYSAGAVETAKWLITEGADIVTDTNMALSGINKRVLARYGGSVHCFMADEDVAREAKERGVTRATVSMERAAKIEKPVIFAIGNAPTALIQLYGMIEEGYRPAFIIGVPVGFVNVEAAKELILQTKIPHIVNRGRKGGSNVAAAICNAILYELGRMLSVYHMTAFTIGFVMDLLFGDPYWLPHPIRWIGRLIGWLDRKLLGETDGAVRNEAAEKKKGRWLVAFVLLPVLFFTAAVLFAAYRIHPAAGVVTESVMTYQMLATKCLKTESMKVYKRLSEHDLCGARKAVSMIVGRDTECLDEEGVAKAAIETVAENASDGVIAPMLYLALFGPVGGFFYKAVNTMDSMVGYKNDRYHAFGTAAAMLDDVVNFIPARISAMLMILSCCFLGNEFDQKNAMKIFKRDRYQHASPNSAQTEAACAGALGIRLAGDASYFGRIVKKPYIGDPLRAVETEDIRRANRLLYGMAFFGWGICMAVWLCVTAIVWMRYEADMALIRHGMTPGNEEHRYIGRTDEPLSQKGREQLLTLQKKGVYPAAACVAASPLERCRQTAELLYPGQAPCVFDQFREMDFGAFEGHNCEELKADVRYQAWIDSNGTLPFPQGESREQFQRRCVEGFCELLKEVWTREKLPASLALIVHGGTIMALLDAFAEGSYYDYQCANAKGYKGRLSVEFNAAGNTLRDTIKIADVRKLEEMELYIGGYAQGKLTYVTDRHPGEKHPVWDGATETFTGRTLKEAPVCNHYHLWVKRLLKDGADVRALTGQLLLEHPDCIIISDEIGNGIVPMEHEEREYRELTGRLLCELANKADRVERIVCGIGERIKMSVIKSFFIAFSIYSKIPVPQFAWKEEDMRYTLCFFPWVGAVIGLCFLLWNRFAGVYGIPSTARAAVGAVLPLAISGGFHADGFMDTMDALHSYRDRERKLEILKDSHIGAFAVICFVMYELIYLGAVSMITEKEQILVLAAGFFLSRTLSGIGVVSLRCAKTNGMLYQFASEAHRRVVLTALYLQLVLCVGLMLAVSVKTGALACAAAGLTYAYYRQKSYREFGGITGDLAGYFVTLCEGVMAVLVAAAGLIGMILVIGGSGSGKSAYAEKVALECQKEKRHFYLATMHVFGEEGQKKVERHKRMRAGKGFVTIEQPTDIMQCLPALREAGGGVVLLECMSNLAANEMFDTEEPAGSEQVAEKIVTQIGVLAQETEELVIVTNNVFEDGIVYDTSTMEYLRALGSINVRLAERSDVVVEVIAGIPVARKGKLPVAVAEKQGHRQKGAPACPMLDRQQMRQLKIEPPDQAVYKEVLGNWDALAKPLDGMGEFEELFARIGAIRRDPALDISRKAVVVMCADNGIVEEKISQSGQDVTAKVAAAMGRGTSSVCRMAKAAGVEVIPVDIGINEEGSPEGVLPCKVRRGTRNFIKERAMTEQETLAAIEIGMEIAKRLAHEGYKLLATGEMGIGNTTTSSAVAAALLSCDPKEITGKGAGLSDTALLRKIAVVEEGIQMHELYQADAFDVLCAVGGLDIAGLSGVFIGGALAHVPVVVDGVISAVAALAAERMIPGVRDYVIPSHKSREPAAERILEELGIRPVLDAGLALGEGTGAVMMCGLLDIARTIYGERTTFADIDVAPYHRFGMAMRIMIQGTMSNAGKSLIAAGLCRIFRQDGYRVAPFKSQNMALNSFITKEGLEMGRAQVMQAEAAGMEPTVAMNPILLKPTNDIGSQVIVNGEVIGNMSARDYFAYKKKLVPDILAAYHRLEEQADIIVIEGAGSPAEINLKENDIVNMGLAELLNAPVLIAGDIDRGGVFAQLLGTQLLLEESERRRVKGFIINKFRGDVSILAPGIRMLEERGGVPVVGVVPYMQISLEDEDSLTTRFDARQEAAVDIAVIRFPRISNFTDFSVFEQFEDVSLRYVDSVEKLHHPDMILLPGSKNTMEDLKWMRQNGLEAAILHRSAETFIFGICGGYQMLGKQIADPHGVETGGVIRGMGLLPVTTELGEQKVRTRVGGEILGGMLDGCELSGYEIHMGISRPEGDCEPFCRIRDEITGKERTDGVFAGNVCGTYVHGIFDHGSIAGKIVRHLAERKGLVLGEDGVDYGLFKEQQYDKLAATLRKYLDLDAIYKMMREYEMKKIFRKNQLVITALALMIAVAGYFSYMNNNMEDGQVTAEASADAGTVQDTYDISEEDMLAEQEIFTDEGTGEELALVEGTETAAVDAAQSGDVAQMTDGAADVENPGEAVLTSTTIANLDYAAEMKLNREQIRSKNKESLLEIVNNTTIDESLKQDAVNKMIAMTDIAEREAAAEMLLEAKGFSDVVVSITEDNCDVVLNMGEVTDAKRAQVEDIVKRKTNIAADKIVITPIVVDESGEMPEKLKRILQNKNWRSWKKSDWLLLALAGILLLVIALPVESGDGTAEKAYNTAQGEKEMSGGSGRTASGDSGGTASGSQTSEEGEQEYVQYLEKKLENILMQMDGVGRVDVMITVSDGGEQIVEKDKKTTSSSTGERDSGGGERSVTEQAGEDSTVYVETADEKYPYVQKETLPTVAGVVVVAEGGGNPAAVSEISESVQALLKVEPHRIRVVKMCSREESEMNAYMRGFVILFVLLVLLSYLPPGKQYRKYIRFYAQLLMVLAALRPLFVLFGGKDTFYEKMAYAQCMEKLSEFSRDTQKIAYLNQDRYRTEYENVIAENIREKVDDMLQEYGFGTQSVTVELGEEHTMQEICIYITDENADEISVGRISVSDAAESGEGQEVCGKVKEELAAYYGMEDSGIRVSYVGGTMREWGKRSFCLVCMFLVLTGMPVTVQATDYDGGTGSAEKTQETYLKTFLEDLDFAELDTWTKEELFPEQREKFSFSVMVQELLADGIGVTSMEKIGQWLCDALLYEIKTGKTILVEVVLLAAGFSMLKNFSGTFEKNYVSDICFLLVYGVLCVLLLKSFEIYGTVAEEALNGSIDFMKALIPAFGISMVFSSGAESSAAFYQLAFLVIYLVEWLFLSVLLPFIRVYVVTELFNHFFEDEKFQNFTELLAGVISWGMKSAMMAVLGLNVMQGLLAPAKDRLLNGAVSRAAMMIPGVGNVLGGIGELMFGAGILIKNCVGVTALIVLLAVGCIPVLKLACMSVLYKLAAAVAEPVADKRIVGCIKSMAQGGVLYLKLVCYGIVLFFATIALQTAAVTSHAMDIVKIAVLGIAGVFLAIPLKREKGEYSTFVAMVVGICIFIYLLTKVETVLLFVDSIKSQLPVDSRYIGLVVKMVGITYVSEFAANLCRDSGYSAIAGQIEMFAKLSILVVSVPVFGAFLDAVGSFLMSVNLIFKIAAVGILVTVIGQVLKHSGREEHAFLTSLAGLIIVLFWIVPYIYELFETMQSLFALMLKIMGSIMVFAAAAGMAGTYKRELADHLALLYALRKLLVDLSCYGNGTRQPVEVLLGCFVRTPDERLNEICRKIADCLIEKNEKNGEQVWKRVFEEYRKKLCLTGEESALIGEAGGALFGRSEEENHRRLTLILEQLDDRIKTVRGELGEKQKIYATVSMVMGGMLVILLIMEIVKIFPVHIREALANDTWKAGLEEIRVRVGSPLEFIYGGESRYLPGREGVYALPSACGYESGYRMTPEDLREMLNYISDYSLYAYSEEVKEGYLTIEGGHRIGMAGQVVKKDGKVTGLSHITFLNVRIAHEKRGCADDILPHIRRSDGIYNTLMLSPPGIGKTTFLRDLIRQLSAGDAGAPGMKVGVVDERSEIAACHLGIPQNDLGPRTDVLDGCKKTEGIRMLLRSMSPQILAVDELGGKEDFAAVKQALCCGCRVLGTVHAGCVQELLDKPYLQACVTQKLFGRYILIERNSRGERSTTIYDERMERICMKKILDLITGEVTQAFVDCGYDAKYGKVTLSNRPDLCEYQCNGAMAAAKEYRKAPFMIADEVAAKLSGNAMFSMVESVKPGFLNFKLDEAYLADYVAKMQADEGRYGCEKAKEPKTIMIDYGGPNVAKPLHVGHLRSAIIGESIKRIGRFMGHTVIGDVHLGDWGLQMGLIITELRERKPDLVYFDESYTGEYPAEAPFTISELEEIYPTASGKSKEDAAYKEAAMQATYELQHGRRGYQALLSHILNVSVTDLKRNYENLNVSFDLWKGESDAQPYIPDMVQKMKDDGFAYISDGALVVDVKEDTDTKEIPPCMILKSDGASLYNTTDLATIVWRMKDYHPDELIYVVDKRQELYFTQVFRCARKTGLVKPETGLKFLGFGTMNGKDGKPFKTREGGVMRLQYLLESVNEEMLKKITENQKAKENLEISEEEAKETAKMIALAAIKYGDLSNQASKDYIFDIDRFTSFEGNTGPYILYTIVRIKSILNKYHSMGKDESGAVIEAAHSASEKNLMLALSGFGAMMENAYEETAPHKICSYIYELANAFNSFYHETKIMSEENEQIQKSYIRLLELTKSVLETCIDLLGFKAPERMMNPKNNRSSFSGKIGFVLSAAGASVGLGNIWRFPYLAAKYGGGIFLLIYIVLALTFGYTMIVAESALGRMTRKSPVGAFQSFGKKKWMSFGGWINAVIPILIVPYYSVIGGWVIKYLLEYIRGDGAKLAEDGYFSAFISDGASTELCFVLFCMFTLVIIFAGVRNGVERVSKLMMPVLVVLSVIIAVYSVTRPGALAGVKYFLVPNPANFSWMTVVAAMGQMFYSLSIAMGILITFGSYMKKETSIEGSTKNVEIFDTAIAIMAGLMIIPAVFAFSGGDPDTLQAGPALMFITIPKVFANMGLGTFVGILFFLLVLFAAVTSSIALTESAVSTFEDELGWNRRKSTVLVGVIMIALGSLSSLGYGPLANIRIIGMQFLDFFDFLTNSVMMPVAALMTSLLVSRVIGIDRMEEEILHGEGTFRRKKIFVLMIKYLCPVFTMIILASSVANAFGWISMMPSAIKNMADGNSDIGFARLCFIAGVQASAAQKSYKLSPGMRTMKPYFEYSDKLNKPYEAFLFDAQTSEMFPILPHWHYFVEILYMVEGTAYVEAGEENYVLEPGDLIVFYPQMTHAIYSAGQLPIRYYVLKFDPVHLVLMKIQNQLGYIKGITFAPFHKRGSLSTQTARDSFDYMIEHTAADFVILAPAGLQEHAHSEEICYTSSATFSDEELINMIRYAKSKGIRVALKPTVNCKNGVWRAYISFFEKDVPCEPKWENWFASYTEFQTHYAKIAEAEQCDLFIAGCEMVMTEHRSEEWRNVIAAIRNYYHGPVSYNTDKYQEENVTWWDCVDMISSSGYYPIDQWEQELDRIERVVQKFKKPFFFAEAGCMSRKGSSMVPNNWANQGALRLEEQPDWYRAMFEACAKRSWVNGFAMWEWAPVLPSRSTAARDTSYEICNKPVQEVIKDYYGRDERKMMHIFSRNRKNNLRTLLSLFKGHYGALAGSVFFFIIKHSPTWVLPIVTANIINAVTDHNGNITKILILNTILMIVFLVQNIPTNYIHTWLYAKTVRTVEKELREALVCKLQQLSITYHKEMQSGRLQSKIMRDVEQIQNLASQIFISLLTIILNIGVSFGVVIFKSRIVFLFFLCTIPVSVLIIVGFKGKIKTHNRAFRKEMEETSAKVMEMVEMIPVTKAHALEDQEARKMSEQLRKVAEKGLQLDMIQTYFSSISWVAFQIFQVFCLAFTAYIAWKGIIGVGDITLYQTYFSSIVAQIASIVTLLPIIAKGLESVESIGDVLCANDIEDNRRKKKVVDLKGEITFQDVSFTYKGDEKPVLSHLNFKIQPGETVAFAGGSGSGKTTILNLAIGFLKADSGQVLVDGNDLMELDLHSYRKQIAVVPQQSILFTGTLRENITYGSESISEEQLWNVIRAANLEEVVQKLPDGLDTMITEHGENLSGGQRQRISIARAFLRNPKILILDEATSALDSISEKKIQDSIQKLVKGRTTLIVAHRLSTIRNADRIAVIEKGNVLECGSYEELIEKKGAFYRMEKMMTTTKLFKKKIPAQTYDKASQKPVIKASICNGEQIAGFKDLHTGKIEEVMLIKGPADLERFKKMYGIEDEIGKEYMIWRKGIAGTKRGVSQPGEHGSIGRLQIKSMDSRNMEYRTMNSIFHRISVRKYQNRDVEQEKIELMLKAAMAAPSACNQQPWEFYVVKDKAVIGRLSEASPYAKCARDAPVVFVPCFRSKGIAPEYFNIDMSAAVENLLLEADELGLGAVWMGISPDEGRMKAVREVLDIPEDLHAFALIPCGYPAEERAQEDRYEESRVHYIMKMIDVAQTSMAAGAACAIAQVTGVNDNMSQSHYHDYFELYFLDSGERYHLMDDKLFKLQAGDCILFPPQTMHRSYGDQDIAFSRAVLYFRPETITSADLLHKLLHSQVVYRPDSQELHQLRRIIYAMEEEQNSHLDCHDECMQSLLNLIMVQLLRMNQESTGILRETRVTKVIQYIHNHYAEDITLKDLSERFYVSEYYLCREFKKSTKRTIVEYIKQTRIMNAKRLFMETDRNVTEVARETGFSNLTHFNRVFREVADVTPSEYRKRCQELHRMKVCYKAGAVTAQNHYYSIAADAVEIRVWFLTDDIIRIRAGFDGDWDEASYSLVTTAWESRTDELMKDYRKRINVAEAALVDGETKAVITGKKLRVEVEKDPFRICVYDAEGTMLHADIPELAYREDSNRRRIHTSQIEDDDYFYGFGEKGGEINKAEKYMNMAPGDAMGYNAKETDSLYKHIPFYIKLQRGTKKAVGYFYHSTAECDFNMGREKRNYWHRYSSFRADAGDVDLFLIAGPSIGEVIERYTDLTGKSVLLPKSAFGYLGSSMYYPELPENCDDAILDFIDTTREEGIPVDGFQLSSGYCAVETEQGIKRCSFTWNYKRFKDPADWFAKMKQAGIVVSPNVKPGMLLVHPLLEEMKEKKMFVLDSTTDEPGIGTWWGGTGIFVDFTKEENRKNWKEYLKQGLIQYGCESVWNDNCEYDSMVDKDARVYFEGKGSTIGTMKPVMSNLMCQLSNEAVTEYNPSVRPFSVCRSGHAGIQRYAQVWAGDNLTCWDTLKYNIATILGMGLSGVANHGCDVGGFYGVSPEPELFVRWVQNGIFMPRFSIHSTNTDNTVTEPWMYTDKKQYIRDAIKFRYRMIPYLYSLESRAHETGLPIMEPMFMAFQNDPKTYNEGVDFMWGDSLLVANVVEKGAETRSIYLPQTGDENVRFYDFYTREEYAPGQTIEVPVDISSIPLYIKSGAIIPMAENQIYNLMHETVTGLHILMAPDVDSEFTVYDDDGKTNEYQNGAYLKTNIKVTAGVRTCVDFTYEGNYENTVDTMYLDVVHREKAPFYVQIDGVEVPHFLHRRKFEEAQTGWYYSQSLKSVQVKYPNPKKDHHVMISFEVFDMIGMMKKNIALILAAALVLPTVIAAGGCGANSGVSSSAEATAENPMVLTLAHGLSETHTVHIAMTQFADEVKEKTDGRIIINIFPNGQLGSETENLEQLQAGVIAMTKVSAPGLATYNEAYNTFGLPYIFNDTEDFYDIMDSEDMQDFFLSSEEDGFVTITYFTSGARSFYTKDKAIRVPEDLKGLKIRVQDMKSQTDMLTALGGTPVAMSYGDVYTALSTGIIDGTENNETALTTGKHGEVCKVYSVDQHAMIPDVMVMSAKVWNNIAPEDQEIILQCAHDATEWHKEAWDQAVDEAITEAEDMGVEFVYDVDKEAFREATAGMIDEYREEYPGVADLLDRIDGIREEEEMAKTLGTIKKYMNKVLAACCAVLLTFMTFLVLWQVFTRYVLNSPAAFTEELVKYSLIWTGFIGAAYAFSTREHMALTLVRDKLTGRPHQILVIFIDALILLLAIFVITIGGYKLAVSARAEFSALLGVPRTLVYSIAPISGIFIIIAQIINLYEDITGNKVEEMNIVLTTIILFVVFGVLLFMGVPISVSIIISSIVTAMSTLSWDQITFITMQKMNSGIESFSLLAVPLFILAGNIMNNGGIAKRLVNFAQLFVGKLPGNLAQANILGNMLFGALSGSSVAAASAMGGCISPIEKEQEYDPAYSAAANIASAPTGLLIPPTSAFIVYSTVAGGVSISTLFMAGYVPGILMGLGCMVVAFIYAKKMGIKATGRDKSISVAKTIWDAIPSLLLIIIVIGGIVSGIFTATEGAGIAVLYCLILSIIYKSIDFKGFMEILLNSAKTSGIILFLISASSAMSFVMAYSGIPAAISSALLSVSTNKYVIFILMNVILLIIGMFMDITPAILIFTPIFLPIAQSFGMSDIQFGVMLIFNMCLGNITPPVGSVLFVGCGIGHVSIEEVTPKLIPYFMVLIVMLLLVTFVPGLSLGVPSLMGLVMRTQSVECSKLGKTRIIEDANIRLVRNATFFEPNIHPHFHLKSHGVVFMGISCGNADGIFVGEKCEHFFQLNVCIGFRVSSTFEHSRSVSDKSETMGELSSGGMEYVLLLIGFVLLVKGADFFVEGSSSLAKILKVPSVIIGLTIVAMGTSAPEASVSINAALGGSNDIAISNVVGSNIFNGLVVVGICAFLSGFQTNAEILKRDMPVNILVTLILCLMFLDGTLGRVEGFLLLAGMVLYITCMIRSALRNREEGEVCKVLPLPKSILFMGGGLAAVIFGGDLVVDNACIIAANFGVSQNFIGLTIIAIGTSLPELVTSIVATRKGDSGLALGNAVGSNLFNILFILGMSAAISPLHVLGESVIDCVLLLCSGILLFVFARTKRSMSRAEGAVCVLLYVAYTAYLFVRMFFIMGITDGRKDFDFHQMMTCGACEAYGRYQVFMTYTVLSLFFIPCIKWNRHYYVQASCCNALYELDAEIGKRIACGGDVEILPQHLRPVHPGNRGNGWNTTKQCRNCGFTTTEDYEFCPKCGLRFMETWYYEVVSIDGDYANLRRTDIPSEDLKLVARALLPAEIMEGSRLKYELMQYEIVEGMWKARGARRKGEKYNQEPFHIQHVLTVEPVHELTGLIWAAALQMVDFKADERLNTLNHSCAHVMAQAVKHLYPEAKFWVGPVVKEGFYYDIDLGENAVNDDVIAAIEKEMKKICKEGKKIYRREISKAEALELFKNDEYKLDLISDLEDGTISVYDQGDFTDLCRGPHVDNTKLCKNFKLVKYSGVYWKGDANNHVMQRIYGVCFPTAEELEAHLKLLEEAKERDHRKIGKEMQLFMSDDLVGRGLPMFLPKGYTVWQELENYIKAKERKLGYLHVMTPCVGTVGLYKTSGHWDHYKENMFPAMEMEGESFVLRPMNCPHHMMIYANRMHSYKDLPIRIGEIAHDFRFEASGTLKGIERGRHFCQNDAHLFVTPEQIESEFASVVALIFDTYKDFNITDYRCVLSLRDPADKVKYHDDDAMWDMAENALRKVLNDIGIEYTEEIGEAAFYGPKLDVNVKPAIGNEYTLSTCQLDFCLPAKFNLTYIDSDGTKKTPVVLHRAILGSLDRFMAYILEETKGNLPLWLAPVQAKILPVKNEDEELNAYSHEVYKYLEDNGIRVEIDERNEKLGYRIREAQMEKVPYLLVLGKNEVADRTVSYRLHGEQQSTTVSMEDFLAMLQEDIRTKKLNPAAAKMVTWNNLDTLASFQELSKVERVNLVEAMSGENGADRVKNYSVPMAGGFSYNYAAKQVDDKVLAALVKLAEEAQLAEKFEALYNGEVINTGEKRLVLHHMTRGQLGDAVTADGVDKRNFYVEQQERIADFANKVHSGEITNAAGEKFTTVVQIGIGGSDLGPRAMYLALENWAKKNGKFKMEAKFISNVDPDDAAAVLNSTDVAHSIFVLVSKSGTTLETLTNESFVKDALKKAGLDPSKHMIAVTSETSPLAKSDDYLAAFFMDDYIGGRFSSTSAVGGAVLSLAFGPDVFAQFLEGAAAEDQLSANKDVLKNPEMLDALIGVYERNVLGYPATAVLPYSQALSRFPAHLQQLDMESNGKSVNRFGEPVDYPTGPVIFGEPGTNGQHSFYQLLHQGTDIVPLQFVGFKNSQIGTDVVIQDSTSQQKLCANVAAQIVAFACGKSDENRNKNFEGGRPSSIIIGEQVNPQSLGALLAHFENKIMFQGFLWNVNSFDQEGVQLGKVLAKRVLAHETDGALKVFSDLLNIMIKLIATDVDGTLVKDGTMQIDPEYMTVIKELVQKGIIFAVCSGKQFISERKLFAPIKDQLLYITDGGTVVRTPQEILMVHTMPRDVWSGMCRMVQEQMPHCDCFVATPDYCLAEDAGSRMFHWLRDSYGYDIREAERLADIPEQDIIKFTVYHKSACEEMCAPLFTPAWKDKAQLAAAGKEWMDCNPLGANKGTAIEFVQKHFGISPEETCTFGDNLNDIEMLQNAGRSYAVANAREEVIAAAKDTCAPYWENGVLQVLKTFLMRIETKRFVIGDLERNDSFIGIVGMRVEDTLKISSYRRWMWFWWFILICDCIIPAVMIIAGRMMWKHCPKKINGVVGYRTRMSMINMDTWKFAHEYAGKLWWKAGVGLLGPTLLIHIPFYGASDNTMGILSIIITVIQLLFLIGSILSTEKALKCNFNQDGTRQMAVGLCHSDKKAVCRNLQYSENVNMPDSPGWKWVQTVQTETADRYLIRLKSREEGRARKTYRVEVKEDTVDAKSAPNVTQIVLLLLLLPLLGIIFAGLRYSLTSLNPQDDLQLVLILTVIAAILGLRIWLIQRKADKTLRYFLMTRIINAPGNRNGAYAGAAQRTADQTWGRTAYAEDAAYAGDAAYAGEDIAGSVEMEEPEERVWVAEWHLSEAYRRYSRLQAIPLAALALGGIIFLYAIAYRFNTSHDTARTMLLMGEAGLYMTLLALLSKVMQYRYLKKAKAQAKRYHARIARVITTGKNGATKYYLYEFMDELGRKCEARAMYPVRQANVGNVQDMVGGKADIWFDGAHLPYAFSEKDGAPDIQMKLRNLIAGTVAAVVVIALMFVYAGNHYVAYNQDADSLLISYDSQKAESDLTFEDVKDDPTVRWIIDAYAIYVPFENGEYGELGGHSREDWDQEQVKEYLSDWWGITSRATATRTISQMLKKGTRASYRHAFETYLKKGYLSMDEDGYVDIISISEIPEDEQCRTWVCYDAYGHLDTRGVDAWDYVRIMRITGLCYQCGYISLEECLDQCLPIAQRLQKEYGSFEEIFESYIYGYQFWKNDSDDDRIYFYRRAAGEAVENIQSEYNTELVKDWEMEQETQTPHKRRVRYKGKYPKKFEEKYKELQPEKYQDTIEHVIRKGNTPAGMHISIMVKEILDFLQIEPGEQGFDATLGYGGHTRAMLECLKGQGHIWATDVDPEESAKTKKRLEDLGFGEDLLTVRLQNFCTIDEIAKEVGGFDFILADLGVSSMQIDNPKRGFSFKVDGPLDLRLNQETGISAAERLDTITREELAGMLYENSDEPYCEELAKAITDEIRRGSHIDTTTKLRRVIEDTLDFLPEKEKKDTIKKTCQRTFQALRIDVNQEFEVLYEFMEKLPGALRPGGRVAILTFHSGEDKLVKQALKEGYKSGIYSDYAKDVIRPSAQECAANGRARSTKMRWAVKAMKLKTIFKKVTAAALAATMVVGMAACGSGSETASSSDSAASSSGTEAAATPAVTDNSKIKIGVSIWSSTDVLGSQCKLILDAAADALGVEVQYVDQGHVSEKVTASVEQLVAAGCQGIIICNSSDTEMTSAIKTCNDNGVYLAQFFRIISETNSADIYQAAKDSAYYIGAVHEDEPANGEALVNILLDKGDRDIGLIGWEQGDATWLGRWEGYKAGVDKWNEAHPDDPAQLSEPQYAGTTSEGGSKAAEALMAADPNLDALIPAGGGGDPLQGAIAAVERAGKTQDIDIVSTDFLPDLGDRLENGSMAGESGGHYCDPLIAFMMVYNAIKGNYTGFAGNFEDVSFPYLYVSSAEDYQAYEKYFVDQLPYTSDELVEMSNLDLSALKEAAKNISIEDAASRAGNMGSKKLSGSAKGYLILLSLVVVSWVIFKILTPHNFGSPANMLNYFQASLIATVGAVGFYFVMVMGMFDFSIGANIMLSAIVGCVFATRFNMGYLGLILGCVLTGTIVGLLNGLFYVKLRIPSMIVTTGLALIYESLANYIAGGVEQTLPSNLRAFGQMPWDIILAIVACIVAYIFLNYTKIGTYTYAIGSNEFVAKNMGINVNKYKVLAFVLSGAFLGVMAILTISYGSSMVAVTGMASMSRNFVPTMGCFFGLAFKKYGMPLQAIVIGEFVINIIFFGFIALGAPTAIQDVITGLALLIIITVTTKVTKGEIVKMSEVRLQVKNLCKSFGITKAVQNVSFNVNKGEVHALIGENGSGKSTLTNMLTGIYSIGSGTFILDGKEIHPKNQVEANNEGVSIIVQELGTLSGLTVAENIFLGHEEQFVHFGIKNTKAMNRKATELLKKYGFDRIKASDIIDNYNFEDRKLVEIVKATYFDPKIVVVDETTTALSQEGRDELYKHMDRIRNSGNSVIFISHDLPEVLEKSDTITILRDGIYIDTVKSADVTEDDLKRLMVGREVTGDYYRADYGEKVSDEVVLSVKNVTVPGIISDISFDLHKGEMLGFGGLSESGMHEVGKAIFGASYDREGTVTLADGTQINDIPTAIKHSIAYTSKDRDNESVVMNQSIGDNICLPSLDELSNKAHFISDKKKKKFANKYAKQMSVKMVNTDQFVSDLSGGNKQKVVLARWIGKDSDIIVLDSPTRGIDIKVKQDIYQLMNQMRKEGKSIIMISEELMELIGMCDRIIIMKDGKINGELERNQDLNENSLITMMVMENQAKTNTEQKEQQLKKLSKMSLIRSLLPVVGLVVIFLLFNVLTNFRMVGNLSLVLSQVYVTMIAATGVFFIMTMGGLDFSQGSILGIASIVVCMLSKISIPLAIVGGIAAGAAIGALNGYFYVYRKIKSFIVTICTMFLFRGFIKYLTTNAPVAGSAKLINYDSTALKMTLTIIVVVIGFIAFRFTKFGTYLKAIGAGEKAAMFSGIRTDRMKFLIYVLAGAITGFAAFINVIKVGSVTSSGGNQLETQILIALVLGGMPISGGAKVRFENIIVGSLLYIVLSSGLTMMGFTTQMMQLIQGVVFLIFVAVFADRQSLQVIKMSKKIGEQSLLKYEKLYNWGRTLITSGVIQNEDKFPSENILQKKFGYSRQTVRTALNQLEAEGLIKRVKGSGTYVSYEGNLRNGERPRIGLILSYFSDYLFPRVYDGIDSVMKEAGYDIDVAVTKNRLNDEAIYLEGLLNGNVAGFIIEGTRSFFPNPNIRLYEEIRKRNIPTLFIHNHYSNQRFDSVEMSDARAAYKLTEILIQNGHRRIAGIFKYDDMQGIERYKGFVECLSDYGVKFDDDWIRWYSTKDMEEKLSKKGLLRMYRRTKDCTAMIVYNDEVAGYYMEFLEERGLHVPEDVSLVSFDDEELQQDARVKVLSVVHPKYNLGRITGKNLLRMMDDPDWQNKNYSYRFPVSINDGNSVKDIRMCTAATYRTKDFYFGRTLDYEFSYGEEIVITPRNYEFNFRHMGQAKEHYAIIGMAHVAGDYPLYYDAINEKGIGMAGLNFVGNAVYAEVTEGKENVASFEFIPWMLRQCATMDEVRALLAKINLVGTPFAEQFPASQLHWIIADENEAITVESVADGLHVYENPVGVLTNNPPFAQQMFMLNNYIGLSPKQPENSFAKDVPLSTYSRGMGALGLPGDLSSASRFARVAFTRMNAVSGNSETESVSQFFHILGSVDQQRGCCEVAEGKYEITIYTSCCNATRGIYYYTTYDNHRIMGVDMHAEDLDGTTLTCYPMIEEGQVSWQNGQNMEKIRIITDSASDLSASTREDLTILPLAIRFGDTEYLDGVTISHHEFYEKLIESDTLPTTSLVSPAAFEEVYARAVADGETVIAITISSRLSGTYQSATIAAEDFAGKVFVIDSYNATIGEGILVKYALLLKDQGLSAKEIVGILEASKEQIHTLGVLDTLEYLKKGGRISAATAFLGGAMAIKPVVAVSEGEIIMLGKARGSKNGNNFLMKEIEKADGIDFTRPFCLGYTGLSDEMLQKYIKDSEALWSGHTDQLPVCSLGATIGTHVGPGAIAVAFFSPQSMDHRFETFSLSILELNRYLQKIKELEMKQFGLKASHTMCLYYLGQHPEGLTATQLTELCKEDKAAVSRCLSQLSDRQLVVCEQPEDHKRSYRSHYMLTVQGCSVVSGIQTRIKEALSYGGRGLTEERRRDFYGTLAIISENLSDYLTKHNQQKMQIRHAGTQDIPGIDRLLSQVLTVHHNGRPDLFRANARKYNDDELKEILEDTTRPVFVADDGAGNILGYAFCVFQQHINDNILTDIKSLYIDDLCVDENCRGQHIGQQLYRYVLDYAKASGCYNVTLNVWACNENARKFYEKCGLVPQKIGMEKILMGFFIAMFLCNLLMPSIMVIAGYCMYKNPPKEINGLIGYRTAMSEKNKDTWAFAHDCCGKLWIKSGIILLVPTVLAQIPFAKSGEDVVGTVTLVIEAVQVLVLIGTVILVEKALKRTFDENGNRRGMKADEVISRVADLCREHGAKKVILYGSRAKGTAGERSDIDIAVSGGADFDELLEKVEELPTLYSVDLLNMDTCRNDLLMEDIKQYGREIMDAKFDRRFQSFCNSLDALAEARERDLTDSFVLSGTSAKFSITFDLSWKVMKDILVQYYAITGFVTGSPRDVLREAFKANLISDDAWMDMLKVRNELAHDYDSEIVKTHCNTIVKEYIASQPDHILSILMYIFLLILIYIAFISLGLPDSLLGSGWPVMHTELGVPVSYMGIVSMVISGGTIISSLLSDKLTRKFGTRIVTVASVFLTVIALFGFSFSGRFWMLIVFAVPYGLGAGAIDVALNNYIALHYKAKHMSWLHCFWGVGTIVSPFIMSYALANRTWNSGYRMVGLIQLGIALLLLVTLPVWNVNQSTSREDGKSVGLTGALKIKGVPFLLLGFFAYCAAEATTMQWASTYFVEVKGIAADRAAGFAALFYIGITAGRFISGIITDRLGDRKMILLGTGILVCGIFILCLPVKSYTVAFAAFLVIGLGCAPIYPCIIHSTPYNFGAENSGAIIGIQMASAYVGSTFIPPLFGLLGNAVSFSILPVYLLGFVVLMITMVETTFRITRKEKVVKMMAKDQRFEKVYSQGTMTTTEIWVDKETGVNYVFHASGYAGGMTPLLDRDGKPVISPVINGMAPLHRQYKXXXXXXXXXXXXXXXXXXXXXXXXXXXXXXXXXXXXXXXXXXXXXXXXXXXXXMFRGANKGHAQKSMRTQSVECSKLGKTRIIEDADIQSVRNATFFDPNVHLYFHLKSHGVIFLMNGLVIILIGIVALGAGYLFYGRWLAKKWGIDPNAKTPAYTHEDGEDYVPSSRFTVFSHQFSSIAGAGPVTGPILASVFGWVSVLLWLIIGGLFFGAVQDFGALYASVKNEGKSMGMIIEKYIGKTGRKLFMLFCWLFTLLVIAAFTDMVAGTFVGKGVDGMTAETSYANSAAASISMLFIVVAVVFGLIQKHVGKMNEVVKAVVAIALLVAMFAVGMALPICTTKSAWIYIVMAYLFLASVMPMWLLMQPRDYMTTFMLLGMIIGAVVGVLVAHPAMQLNAFNGFTVNGSSLFPTLFVTIACGAVSGFHSLVSSGTSSKTISNEKDMPMVGYGAMVVESLLGIVSLVVVGAVAVNGTKPDGTPFAIFSSGVAGFLEKFGLPVQVATVFMTMCVSALALTSLDSVARIGRMSFQELFYGDTTDPAKMSPLQRVLTNKYFATVITLFFGYLLTLGGYNNVWPLFGSANQLLAALVLIALAVFLKTTGRTGWTLYIPMFAMLAVTFTALIQKTIALVKNIAGGQATFLVDGLQFIVAVLLMVLGVLVAFSCLKKLFGKNRAGQAAMKQILCFGDSNTYGLIPGTKDRYDWDTRWSGRIGQRLWEDGCRIVEEGLCGRTTVFDDPLRDGRRGTELLSVILETHKPVDVVVLMLGTNDCKTMYDTSAEVIGRGVERLLDQIRSSTPDSKILLMSPIALGEGVGEAGYDPEFDESSVAVSKRLPEVYRRIAHERGISFLAASAYAKPSEEDREHMNEEGHAALAEAVYAKLKEMLAGEKENAQIPAMAEKNLDFDTVIDRTHTNSLKYDFAVQRGKPKDVLPLWVADMDFQVSSYIQEALSGSVAHGIFGYSEAEGSYFEAVAGWMSRHYGWNVEETWLVKTPGIVFALAQAVRAFTEPGDAVLLQQPVYYPFSQVIRDNGRKIVDNTLVQGEDGRYRIDFTDFEEKIRSAHVKLFFLCNPHNPVGRVWTREELLRLGDICEKYGVIVVSDEIHADFVFEGSHQVLAGLKESYRKFVVTCTAPSKTFNLAGLQVSNIFIPDDALRRKFEQAVAASGYSQLNTMGLVACEAAYRHGGEWYDAVKAYIRENLAYAQHFLEEQIPQVKAVKPEGTYLLWVDFRSLGLSGKELEDLIVKKAGLWLDSGDIFGAAGRGFERINVACPRSVLTEALERLACAVREKEPIVCKMKNGVQRHLIFVMLNTVLEDTKTCRQRKTFWRGGACENQYMKINIELDNALEETEVLIRAAKMTEEVNGILKKLEEPSVQMISGFAGDTLEILEQADIIRVYAAKGKVYAVTAKGEYLLRMRLYEAEERLDQTRFVRISNSEIINLKMAKRFDLSFSGTICVNLAGGQTAYVSRRYVAKIKRLLGIMRKGTVRDMKKKVLLRGLFGIPTGIAIGYVITVMMSAFWGDGSYYPCVPAFVDAMGSEIRAVVVQTVLCGLVGMVYAAGSVVWEVDRWSLAGQTAAYFLITLGSVLPVAYAAYWMERSVAGVLSYVAIFCAIFAGIWISQYLGWRAKINRINKKIALDKMMSKIAESALDLIGNTPLLKLNRYSAEAGVKDATILGKLEYLNPAGSVKDRIALAMIEDAEKKGILKPGATIIEPTSGNTGIGLAAVAAAKGYHAILTLPDTMSVERRNLLAAYGAELVLTEGAKGMKGAIAKAEELKESTPGAVILGQFVNPANPAAHKATTGPEIWEQTDGKVDIFVAGVGTGGTVTGVGEYLKEKNPNVKIVAVEPATSPVLSKGTPGAHKIQGIGAGFVPDVLNTKVYDEVITIENDDAFTEGRAFARSEGILVGISSGAALKAAAILAARPENKGKTIVALLPDSGDRYLSTSLFAKNMTVESAGGLFLTVESAEDLLLHGKSAGRPGKTGAETGKLWTFAENMIMEAERAKRIKELQKEKDVVILAHYYVDGAVQEIADYVGDSFYLSKVATKVPQKTILFAGVTFMGESAKILNPDKTVVMADECADCPMAHMITADRIAEVREEYEDLAVVCYVNSTAEIKAVSDVCVTSSNAVKVVSNIPQKNIFFVPDNNLGRYVAEKLPEKHFIFHDGFCHVHKSIHAAELQAAKDACPDALVLTHPECTEDVVAMSDFVGSTSEIIDFATQSDCKKFIICTEMGVFFELQQKNPDKKFYSVGHRQFCPNMKKVTIDKVEQVLEKLGSGELEEITLSDEILTRAAKPLQRMLELAKMLNQFSRTELLLGKEAMERLSRARVAVFGIGGVGGYTVEALVRSGVGAIDLIDDDKVCLTNLNRQIIATRSTVGKYKVEVMRDRILDINPDCKVEVHKCFYLPETRDEFDFSSYSYVVDAVDTVTAKIALVMQVQETGTPIISSMGAGNKLNPAMFEVADIYKTSVCPLAKVMRRELKKRGVKKLKVVYSREQPVTPIEDMSISCRAHCICPPGAKHKCTERRAIPGSNAFVPSVAGLIIASEVIKDLAAEMYQRTIEELQKDEREKVIIDIRREADFLRETYPGAKHIYWEEFEAHKDEVPKDCPVYLICYTGERSDELARELLEEGYEVYSVQGGYRAYLRMKLLESMEQTKAPDAEEKNLDRCSEIERSIVKKFRKEIWRKFTKAINEYELIQDGDKIAVCISGGKDSMLMAKLFQELERHGKKNFEVVFLVMNPGYNEINYETIVNNARILNVPITVFTSEIFDIVAGEEESPCYLCARMRRGHLYSKAKELGCNKIALGHHFDDVIETILMGMLYGAQVQTMMPKLHSTNFPGMELIRPLYLVREEDIIHWMNYNDLHFIQCACRFTESCASCGGTEKGSKRAEIKDLIRELRKKNPYIEKNIFRSVENVNLNTVIGYKKDGVRHHFLDEYDKAMKKRWMALLGAAVVTMNLFAGCGSTGAEQTGNNADGTATEAVQGKDSAGDGNAAQSVAGTADTVIVAMSPSSEPAAGFNPCINWGCGEHCHEPLIQSTLIRTNVDMEFENDLATDYSVSEDGLTWTFHIRDDVKFTDGEPLTASDAAFTFNTALATPNSEADLSMLDSVEAPDDTTVIFHMSKPYNAFLYTLAVFGIVPEHCYDEAAYGENPVGSGRYILTQWDKGQQVVLEANPDYYGDEVQMKKVIVLFMEEDAALAAVKAGQVDIAYTSAVYSDEQVDGYQLLVCKSVDSRGISLPSIPAGSEVVDGDTVYAAGNDVTCDVALRRAMNYALDRQTMIDHVLNGYGEVAYSVSDNMPWSSESMIIPYDVEKAEQILADGGWSDTDGDGIVEKDGQKAEFTVYYSASDSVRQALTAELSNQMKAVGINVLYEGLGSWDELYTKMYSDPITWGWGSNSPVEDYQLYYTGGSCNFTGYSNEKTDELLDAALAATDMNESYSLWQQAQEDVGPDAEALWVWFANVDHLYFARDGLAVAEQKLHPHGHGWSLVNNVDQWTWEMNIRHYISFFIKNVIKMLTLLIGVSIAAFMLVSLSPIDPVQANVGATAYMRMTPEKRAQMESYWGKDVPPAERYLNWAKDFVRGDMGTSLKYNRPVAEVVAEKFGNSFALMCVAWVLSGILGLVLGIVAGYFKDRLPDHLIRGYALLLASTPAFWIGLLLLMIFAVWLGWLPFGMNLPAGMTAAEAGIGVRIRHLILPALTLGLTGVANITLHTREKMIAIMESDYVLFARARGESSGYIVKRHALRNLVLPAITLQFGSISEIFGGSVLVEQVFSYPGLGQAAIDAGLGSDVSLLLAITVISTLFVFLGNLAANVLYGVIDPQIRRGRSHGMDKTGHMTIAAHTAGRRNGRQWMRRFLLAAVLLLAAVAVAGICLEERAVVTDFSRKNLPPCLKYLFGTDWMGRDMLSRTLAGLSTSIRIGVLASAVSAVLALFLGTAAAVGGKWADGIISWCIDLMMGVPHIVLLLLISYALGKGEKGVVVGVALTHWPNLARVIRGEILQVREAAYVGIAKQLGKSPWYIARWHIFPQILPQFLVGLVLLFPHAILHEASITFLGFGLPPEKPAIGVILSESMSYLSTGKWWLALFPGLALVGVVVLFDRIGSGLKALLDPSSAQLMEEKKELLRIEHLTVSFAQYEKRSAKQGELPVIRDLNVTVREGEIVAVVGSSGSGKSLLAHAIMGILPANAAASGSIFYRGSACGEAELKALRGREIALVPQSVNYLDPLMKVGRQIIGETKKRQKLFGEADQGKRQKLFCGADREKRQEEARMRELLARYGLADEVADLYPFELSGGMARRVLLLTALMWQPRLIIADEPTPGMDLVLAKQAMQDFRTFADDGNGVLLITHDLELALEVADRIVVFYAGTTVEEAKVTDFADETLLRHPYTRALYEALPGRGFAALPGTQPYVKDLPAGCPFAPRCADRREACDGEIPVACVRGGRVRCILYTENSMRLKAEHISYKYPGGSREVLSDVSLELGSTDRLGIAAPSGFGKTTLCQILAGCRTPMTGRVCVDDMPLPGSGYCPVQMIWQHPEQAVNPRVRMQAVLQEGDSISERVIEGLGIERDWCNRYPGELSGGELQRFCIARALGERTRFLIADEISTMLDPITQSQIWNFLLAEVKERKIGLLVVSHDEKLMEQVCDRIMRLMEEKIYKTMGSTGAASLAVGICVLTGGIAAGILLIVNGARLLKNRAKMIFMYTMTVAPGADASGSFYSLKAAFAAMPEDPAVPVTIRVMPGIYREKLSLTRPNVTIEGAGASPSDTVISFGDYGYEIMPDGIKRGTFRSYTFFVHAADVTLRNLTIENTAGDSKTHGQAIALYVECDRFVAESCRILGHQDTLFTGPLPSEEYEPGGFRGPTESAPRINGRQYYHNCYICGDIDFIFGSATAYFEGCTIASLGPGYATAASTPEGQEYGYVFHNCRFAAEGCPQHAAYIGRPWRDYARVVLMDCAIGAHIHPAGFHDWGKERAHGTVLFAEYHSYPQDADCDCAGGCRPFAQRADFVDTLDGAQAAHFSRELVLSEDDGWLPMHTFQPLPFDLVEFNPFTKIGKEWALVTAGNKEKANTMTVSWGGVGVLWGQNVAFIFVRDSRYTKEFIDANEFFSITFLSEQYRDALNYCGSHSGRDEDKFAAAGLNLATRHNIPYVDEGNFVLLCEKMSATRITEDSFLLPEIKEKWYKDGDMHTMYVAEIIDILARMIPFWRENDKKADGKTGYFSRRKEGAQMSAGAVEKIAGARIIVIMAGLGHRQDRGVMLPPLDEIDGFMVRPGFYNSEGAVPTARGVSFTIHSVGATGCTLLLFRPQEKEPYARLKYPEAYHIGNTFAMLVFGLKIDEFEYAFQLDGPYDVSRGLLFDKNNVLLDPFAKAVTGQRNWGERPESDEGFVYHARVVENNFDWGKMTFPEIPAEDLIIYETHVRGFTRDVSSGVTAGGTFEGLRQKIPYLKDLGVNAIELLPIFEFDEMESARVVDGVQLYNYWGYNTVSFFAPNTSYSSVVEHNHEGDELKLLISELKANGMEVILDVVFNHTAEGNENGPCFSFKGIDNNIYYMLTPDGHYYNFSGCGNAMNCNHPIMRKFIIDCLRYWVMEYRVDGFRFDLASILTRDQNGAPMPDPPILQGIACDPILGHVKLIAEAWDAAGLYQVGSFPAFRRWSEWNGRYRDDMRRFLKGDGSMAGTAINRIIGSTDLYDPVHRGESASVNFLTCHDGFTLYDLYSYNTKHNEKNGWNNTDGDNNGNSWNCGAEGETDDPQIEGLRRRMVKNAFATLLCSRGPAMFYGGDEFCNTQFGNNNAYCQDNIISWLDWTRLEKYREIHDFVRYMIGFRKRYAILRKKTKPVACNLPEISIHNGYPWNGGTDSNSRLIGIMYAGRDEHDTRDDIVFYCMNAYWETLVMQLPELPNGLQWKVCVNTSVEYEDGRDMESYTEFYYKKTLKVPPRTAIVLVAEMYKTVLITGASRGIGRAIACAFAREGCRLVINCSHSEKELLALADELRETCHVDVLTSIGDVSDYTYMEQLFSQSEARFGGIDILVNNAGISHIGLLEDMTIDEWNRIIGVNLTSVFSASKLALPHMIHQKSGKILNISSIWGNVGASCEVAYSACKGGINSFTRALAKELAPSNIQVNAIACGVIDTEMNACFSEEERAQLAEEIPAGRFGAPEEVASLAVQITTGNDYLTGQIITLDGGYLMNSPQTINGLMRHLRNDCKIQISGSYQKQQLTSYGYYHGYKGYRFAGNSYRQIPYSDFSEVVAVIEYDNNLKAALYPELMFIETALKNIVCNESVKGLKLGTFEHLYKERMSDNTTNTKLQSKRLKLRNSVYAKLAARYHDEEEKENQMVRHFYNRGEDAPIWVVFEILYLSDLAGFFECLNEAVRENILKQMNMFDISIDANKNLLSIMIYTLKALRNSVAHNNIIFDTRFKDRKISPVLKKWVEKETGIQNITLYSLIDYIIIVCCLLKRVDFSGTRALTLLNKYKEENQRLQNSVASEIYDHIIQNNVPAKVVGLEAYLNVMTTKELLEKLELIQKLKCETPTDKECKPGMSQTFIMKGKRIKDKDSVNRTRIALSKPPVQCIIALMICEMGKDVIIACDFNSKAEVIAFLEKFKDEKPFVKIGMELFYAEGPDIVRTIKGMGHKIFLDLKLHDIPNTVKKAMAVLSGLDVDMCNVHAAGTKGMMQAALEGLTRADGSRPLLIAVTQLTSTSEEVMQQELWIDKPIDETVMHYAKNTMEAGLDGVVCSPLEAGKVHAVCGEKFLTITPGVRFADGDVGDQKRVTTPAKAKELGSDYIVVGRPITQAADPVAAYRRCVEEFVGMPQKGLSGSTLKLIAIITMLIDHIGAAVIARLLIAGQGSEMLYKIYYAMRAVGRVAFPIFCFLLVEGFFYTGSRKKYALRLFGFALLSEIPFDLAFSGKILEFGYQNVFFTLLIGLLTIMLFDAVVKKQEWHPVLRSALLVIITFGGMGAAYLLHTDYDAKGVLAILVFYMTRQMRGLQIVAGCLAFCWELPAIVAFIPIAFYNGKRGWNIKYLFYAFYPVHLLVLYLICVGMGTAQIAVVMMQIIAFGILLYCGMEHFDVVIGAVDFVLGIVMPFLVGGAIAFVINVPMKSIERHLFAKNGKLAKWRRPVAYLLTLALVIGIITLALVVVIPELGNTISMIVQQVPVAVKAVQKWLTDLPDSYPALAPAVAELNIDWSSLADSIVTFVQNFAAGVVSSGVGIFSGIVSGVVTFVIAFTFSIYVLFQKERLARQAKQILYAVFPEKATEKILSVAALSNQVFSSFLSGQCVEAVILGTLFVITMSILGMPYAMLTGIVIAITALIPIFGAFIGCVIGMLLIVMVDPVQAVWFLVLFLVLQQIEGNLIYPHVVGSSVGLPSIWVLVAVTVGGNMFGILGILVFIPLCSVLYALFAMFVKKRLREREIPESRWNAPSGGAAATEPAEEQSCGMEAYEYLEKIRAAAPRVHCITNYVTAHDVANMILACGANPVMADEPQEMGEITAHAGALALNMGTPSERREQAMLAAGKAANANGIPVLLDPVGVGASAFRRKMAEELLEAVTFTAIRGNMSEIRTLSELAEKKVTGSSGGVDVCPVDVVTEETLVEAVTFVKAVSKRLGAVLAVTGAIDLVSDGQQCVVIRGGREEMSRVTGTGCQLSGLAAAFLAVARDMEAPAGSTGGNTAGGAACATRGMEAVAAAVCVMNAAGEIAWEQRGLCGGNASYGTGIIDAVYRMDQKMLEGRIRYEVRMKCGKRDLLLYAVTDRSWSEGTTLGAQVEEALRGGATFVQLREKKLTGEALRAEALEIQAVCRRYGVPFVINDDVALAKEIDADGVHVGQDDMEAGDVRAILGADKIIGVSAHNVEEALRAERHGADYLGVGAAFTTSSKPEAGHIDAETIRAICETVKIPVIAIGGIKEGNLLQLRGNGLCGVAVISAIFSQKDIEAATRRLHALAEEMAGDQEMKGAIFDMDGTLLDSMQVWVHVGEQYLRNRGIEPEEGLGDVLFPMSMRDGAVYVKEKYSLPDPPDTIVTDMDAIVFAAYRDEVLPKPGVAAYLESLKKQGIPMAVATATNRPMVEAALARTGLASYFKQIFTCTEIGAGKERPDIYLAAAKALGTHPADTWVFEDALYAIKTAKAAGFYTVGFYDETSRNDQEAIAGLADCYVREIQSVPTQDCTMCGRFNLFPHKTVLENVMLAPVHVKKMEKGRAEALAKERIGKAGLADKVVFMADGRILEEGKPEEIFSNPKTPEARQFLRSVLMNKFVMRQSLLLLLTATIWGVAFVAQSVGMDYIGPFTFNVVRNVIGGLVLIPCIAVFHRTGAKEEDAGKTPGSRKNLLLGGICCGVMLFVAGNLQQIGIQYTTVGKAGFITAMYIVLVPILSIFLGKKAGIKIWAAVALAVAGLYILCMTDGSFSLQKGDLFVLLSAFAFSAHILVIDHFAPLADGVKMSCIQFFVCALLSAVCMWLFEKPDMGAVLQAWIPVLYAGVFSCGVAYTLQIVGQRGMNPTVASLILSLESVISLIAGWVILGQALSVRELSGCVLMFAAIILAQLPERKRGAMDIYNEAILHTTATFDTEVKDMENRKAWFAEHNGRYVIYVDVEDGKVAGYASLSRYRDRKAFDPAVEISIYVHKDYRGRGIGRSLMEKVLAYAAECEEIDTVISLITSENAASIHLHEAYGFEYCGQIKNAGTKFGRKLSLNAYQILYDRMMKYFMTDNQVIHEEEKLQDGVWVRMISPTQEECEEIADVLNVDIDDIKAALDEEESSRIELQDGYTLILVDVPTTEIRHDKQSYTTIPLGIILTQDVIVTVCTEDTPVLKNFVINRVKEFSTKKRLRFVYQILYRTATIYQTNLRIIDKRRTEIEERIGQHTEDVDLIDLHELESTLVYFATSLRANGVVLDRLTRYKRLEQYPEDTELLGDVIVENQQAIEMTSIYRDIINGTRELMSSVIDNRLNNVMKYLTSITIVMAIPTVISGIYGMNVDERWMPFANTPHGFLLICVLTLLICIITMLILRKKKMLMGGAAEQLRGEKSIMKTKIYGTIGPACCDTEMLVHLFEKGMTGIRINLSHADLEEADAWISGIHSAWSRLHDGTPEILIDLRGPELRIGTLGAERLLKEGDGLSLVADGQNNLFDPTEIPVPGTLLVALAPGQEILLDDGRIALKVEEQFRCGSSVAVECTVVRGGVLKSGKSIAAPGVEIQTPTLTERDYRNLARVKQCRITGVMLPFVRNQEDLKNLKQALINEDVGDIRIFAKIENLQGMEHLGELLPHCDEIVIARGDLGNAMPLAKLPCAQEEIAAQCRKHGRAFMVVTQMLASMEYRAVPTRAEVSDIFRAVQQGAASVMLTGETAAGEYPLEAMEVLVDTVREAEWYLEERRMALPYISVEDCFPVIRQTILDTYKVDSFLMHYPYSDLERLDMGLRKMVWGTYSTNSAIFSLSPEQDAWQIIVLKSVLGFYNLIITVTNEEHPDMFGFMPFRTEPATPAVINRIMKENGIPPQYTSSMQQVYYNLPVVEMQSLITTLQHLITTFIPGFAANHVEYINYTSEQHEVDFNEERIHKFTSDYMANLAEHIKSCGDAVITGDQTASSESMKSLLNFAVSFSETPLSQLKEYLSYINTFLSAKMMDTQVHPAYIFKQMHTFQLKINETVQAQELQHLPYEMVRKYCLLVKNFTYDNYSYLIRSVVNYINQHLSSELSLATLASEFGKNASYLSSEFKKEVGDTLTTYINKHRILASLRYFNTTDMSVAEVSNAVGYTDMGYFSRLFRKYVGQSPREYKKMLDKMGNTNTKPFGVKDKIGYMCGDIANDFTFIFASSYVMVFYTKVMGVSAGMVGTMFLLARCLDAFTDIGMGRIVDNSKPTKNGRIRPWILRMCAFVALASFMMYQSFLVDAPYAAKVAYMFITYILWGSIFYTSVNIPYGSMASVISSEPKDRSSLSVFRSLGGTLAGILIGMLAPMVVYYTDEAGNKVVSASKISMIAGIFSVLAVICYLLCYMLTTERVAYVPKPDVQKKTFGQTVSALFSSRSLMGLILSAVLLLLASLMSQGINQYLFADYFKNTAALSVYSLLMLPCVLVLSAVSTKLAVKYGKKECSLIGMFISAGLYFIIGVLHVKNVWLFVGLAFLAMIGMYFFQMQCWALVTDVIDDMEVKNHTRDDGTVYGMYSFARKIGQAIAGGLSGWALGWIGYDELATSQTQEVANGIYNLSTFFPAIIYALCGLALLLIYPLSKAKVEANVKELESRRKMETDIFYKHWKTFLTECIFLQFSICKKAENVKKITIYACILHKNETENMEELNCETAFTIPVFGGIPVAESVVVTWVIMAVLLLGSIILVRNLKVENVGKKQVVLETVVGGLYNFFYDLLGEDGKGYIPYLMTVGLYIGVANMIGLFGLKSPTKDVGVTGALALMSIVLIEFSGVHKKGVKGFLKSFAEPIPLMLPMNILEIFIRPLSLCMRLFGNILGAFVIMELIKIVAPLLVPVPLSLYFDLFDGFIQAYVFVFLTSLFIKETIEMTSLIAIGAGIAALTGIGAGIGIGLATSKATDAIARQPEADGKITKALLLGCALAEGTAIFGMVVAILIILFLGMQLLRIDWNVIFTIVNLIVLYLGLRKFLIGPVTKVMDQRKQLIEGQMADARHVNEQANELKAQYEDALKQAHEESAQIVEKARKSAQAEYESRMDAADAEAQKIIANAHKSIDLEREKTVQELQSQIAGLAMAATAKVLGDTDQAAQNKLMYEQFLAKTGGLNDTNSKMTQTANNYGTVLFELGVEKETVEEMKRIFSLTGELPRVLDCPVVSGREKHRLIEQLFPKEVWNFLKEMCDHGNVSEMEDVFKAYTRCYDEANGILKTVMYCAGTPDEEQLAQIKAYLAAKHHRETVELTICTQPELIGGFVLETGDLVEDYSVRGRIKNLEQKLTWRMGSINSEEIISILKTEIENYDMVTGEQEVGSVIWVGDGIATIYGIEHAMYGEIVIFENGVRGMVQDIKRDQIGCIILGKDTGIKEGTKVTRTKKKAGVPVGNAYLGRIVNALGAPIDGKGDIPADDYRPIEQEAPGIVDRQSVKQPLETGILAIDAMFPIGRGQRELIIGDRQTGKTSIAVDTILNQKGKDVICIYVAIGQKASTVAKLVNTLTKNDAMDYSIILSSTASESASLQYIAPYAGTAMAEYFMHQGKDVLIVYDDLSKHAVAYRALSLLLERSPGREAYPGDVFYLHSRLLERSSKLSDELGGGSITALPIIETQAGDVSAYIPTNVISITDGQIFLEGDLFFSGMRPAVNVGLSVSRVGGAAQTKAMKKASGTIRIDLAQYREMEVFTQFASDLDDMTKEQLQHGKCLMELLKQPLCHPMSLADQVITLVAANKRLMLDVDTAKTKEFQLGMLDYIHVQHAELVTKINEEKVLDDAITEQIVEAVKEYKSRMANTKEIQKRMKSIRDTMKITSAMYMISSAKLRSAKQKLEQTEPYFYALQGSISRFLRHIPEVQNRYFDQKKEIPEEEKRRGYIVITADKGLAGAYNHNVIKMAHELFTQGENNKLFVVGELGRQYFAKEGLAVDAEFKYTVQNPSLHRARVIADHVMDLYAENELDEVYIIYTKMENSFSMNAEKMKLLPLVKEDFLHPAPADIYQEEIRVESSMEAILEHVVPNYVTGYIYCALVESFASEHNSRMMAMQAATDSAKDMIQTLSIEYNRVRQAAITQQITEVSGGAKAQKNKKKKMKKGKIAQVMGPVVDVEFEDNDLPYIKDALEVDNNGKRCVMEVAQHIGNNTVRCIMLAASEGLCKDMEVIAEGGGIKVPVGNKTLGRLFNVLGDTLDGGESLDGEEHWVIHRDPPSFEDQSPVVEVLETGIKVIDLLAPYAKGGKIGLFGGAGVGKTVLIQELIRNIATEHGGYSIFTGVGERSREGNDLWSEMKESGVLDKTALVFGQMNEPPGARMRVAETGLTMAEYFRDEEHQNVLLFIDNIFRFTQAGSEVSALLGRMPSAVGYQPTLATEMGELQERIASTKNGSVTSVQAVYVPADDLTDPAPATTFAHLDATTVLSRKIVEQGIYPAVDPLESNSRILEEDVVGKEHYETARRVQEILQKYTELQDIIAILGMEELSEEDKLVVYRARKIQKFLSQPFHVAENFTGVPGKYVPLKETVRGFKAIIDGEMDEYPEAAFFNVGTIDDVIERAKEMGAMNTFSLKVIACDRVFFDGRCEQVVLPLHDGEKAIQAHHENMVFAVEIGEIRITDETGEEIVGVTGTGFAQIINNRAMVIVDTCESPEEIDVRRAEEAKERAQEQLRQKQSIQEYYRSKASLARAMSRLKVGKKDRPTGYMAQFVKLVPENLKALREVNPRLMSYNVEFAEVTGGTFWKAYTPEQVAGTEEFHVAPSADGIAAMYKDLMQVYAPIDLYNEKLRSLAKELGTAWVRVSGTWATKTYYDFDNATGGIAPEGYLNVLTKEQWIGVLDFVKAIDAKLMISVANCPGLHSAEEPWNPSEAEKIFRLSKEHGVPIDGAEFANEPNMMEDTGFPAGYTPADYHRDQDLFFAWVRANYPECICIGPSSVGEGLTINGGDDNSKSGGIEQLVRENCSTTDLLEDTKEPLDVFSYHYYNGVSERLASVMPSGHWLADTAHTEAYLDVALNCARTYAPLRDKYCPGGEMWVTESGDAGGGGDTWASTYLDVFRTLNELAGFAAITDGVIFHNTLASSDYGFLAREVFDPRPNYFAVLLWNRLMGTTVYDTAEPIREGAHVFAHSRKDGKEGVVYLVINNSLTEATTVELPKSAERYTLAGEGGNVRAAVMTLNGKPLVLGAGNSLPELTPAAQEAGTVTLAPATCTFFVLMWIADNWKDYEVIDCSKGEKLERWGDYLLVRPDPQVIWDTPKTERGWRKMNGHYHRSAKGGGEWEFFDLPQQWTIHYGKLTFNLKPFSFKHTGLFPEQAANWDWFSEKIRSAGRPIKVLNLFAYTGGATIAAAAAGASVTHVDASKGMVTWAKENAVSSGLGDAPIRWIVDDCVKFVEREIRRGNHYDAIIMDPPSYGRGPKGEIWKIEDAIYPLVQLCEQLLSDDPLFFLINSYTTGLQPAVLSYMMNTVLKKHGGHIAADEIGLPVSSNGLVLPCGASGRFERMNYSMVLYILGYILKFESAFLMLPALVSLIYQERAGIPFVITAAICLVLGIVFTHKKPSSSTVYTREGFVTVALSWIVMSIFGAIPFVWNGDIPYYVDALFETVSGFTTTGSSILSDVESLSHASLFWRSFSHWIGGMGVFVFIMSILPLMGGSTINLMKAESPGPSVSRLVPHIKDTAKILYGIYLAITLLEIVILCALGMPLFESLLTSFGTTGTGGFGFRNDSFASFSPAIQNTVTTFMILSGINYTFYFCILSRRIKDAFRIEEVRWYLFLIFASVGMITYNIRPLYANTRDALRNAFFQVGAIITTTGYSTADFDMWPALSQTILVTLMFVGACAGSTGGGMKVSRLVILFKTIRKELSLIIHPREIRKIRMDGHVVEHSTLRSTNVFLVIYFILLMLSTLIISLDEFDFTTNFTAVVSCLNNIGPGLNRVGPAQNFSIFSPLSKVVLIFDMLAGRLELFPLMILFMPSTWRKKMDIIIVGCGKVGFTLVEQLSNEDHNIVVIDEKPEKVQYITDRLDVMGIVGNGINHKTLLEAGIATADLLIAVTGDDEKNLLCCVIAKKTGHCQTIARVRNPIYNGEIAFLKKEFGLAMIINPELTAANEISRVFQFPSAIRVDSFAKGHVELLHFKVSENSPLIHLKLFNLHQTLHSNVLVCTVIRGSEVIIPNGDFEFRAGDTVAIASERRNAIDFFRKIGIVKNRVGNAILAGGGKVSFYLAKILIQSGIRVTIIEINPSRCDVLSELLPEATIICGDATDQDLLSEEGLEQAQGFAALTGLDEENILLSLYANDVSNAKTVTKINRSSFNSVINEMNLGSIIYPRVITADYILKYVRSTVNSINSNVETLYKLAGGKAEALEFIIKENSAVAGIPLQDLNFRKNTLICCIYRNGKVILPGGQDMMLAGDSVLVVISGYRISDIKEILEDMLEQLVECENRLLEEQRRFNELLLAWRSGDLGDDLTRMKIEQMQREVDALGRQLTALRTVIAAQADRERAGYRQGAMPKAAYGWPAYGQAVAAAQPWNQTMPRPAAQTAEPGKPQQAYQQTPPQPAVQTAETGNPIPPAPGAMSQSARETGNPQQAYQQTPPRPVAAQAGYQQASGKQDLEKTIGRAILPVCAAGLIFLSLVFFAMLVLPYLSQGVKMVLMYTVSAAITLAGGILVAHDRRNKAFLGLLGCGMGAWYLSLFLSDFYFRAINDGILYLGLLVWAVVLCVLSRLRSNLFLIIGQIGVGISLILGVLMCNWTEDAERFLILSIYYAVTQTIFFVSHLRREYYRNAVNLVSWSIGLLILVLGAAASYTEGSAAGNVSVVLLLALAAVPVLLGVAAAEMDENGKLLGGIVGALCIIIFCGLFLNRFTGAALLLLVFGIAVLALLEFRRPGDLSAGTVLLEVAVFAQMFFAGAAAPYFGEYISTGLLAEACLLYGFLRKRKAYRAAALGYGILLLLIPMNGGMRTVWGLVFFCSAVLLIRFCREQYETWMKICGYLMFLAFLSETAVWGTDLAAVADVYLSDLICFMPIVLCNILAAKVPLFRRNPKTGEEEKAFAAVTMAVQALLIAAVLVLMGKPDAPVLHLIYVLLGLVLVCTNTYSLLIRKDGDWWGIYVALKLLLFASVALHSYGVPVFVNDVTGIVIAFCCIVAGFLAEMRMKRKYKALRVCGLVLVLLCVVKLVLVDIRYDNVLLRAAGFFVGGILCFGISLVYNLVDKWMGRRENAKNMASQVMRITLKAYDHKLVDSSAQKIIETVKKNGSQVSGPVPLPTKKEVVTILRATHKYKDSREQFEQRTHKRLIDIVTPTQKTVDALSRLEMPAGVYIDIKMKNKMKKAILATKVGMTQIFNADGVLVPVTVLEAGPCSVTQIKTVENDGYSAVQVAFADKKEKVVNKDANGKKQVAHRHGVNKAQMGHFAKAGVSGKRFVKEFKFENAADYNLGDVIKADIFAEGDKIDATAISKGKGFQGAIKRLGQHRGPMAHGSKFHRHQGSNGACSSPSRVFKGKGMPGHMGSVQVTTQNLEIVRVDAENNLLLVKGAVPGAKKCLVTVKETVKAGKMAKVAVYNMEGKEVDSLELNDAIFGVEVNEHLVHMAVLQQLANNRQGTQKAKTRSEVRGGGRKPWRQKGTGHARQGSTRAPQWTHGGVVFAPVPRDYSFKLNKKEKRAALKSALTSRVAENKFIVLDELKLDEIKTKKFVEVMKNLKVEKALVVLNDMDVNVIKSADNVPTVKTAQTNELNVFDVLKYDTVVVTKDAVKTIEEVYAMANVQYYDVILKPVVTEKSMAAMAEKKYTFLVHPEANKSMIKEAVEKMFEGTKVASVNTMNMDGKNKRRGMVTGKTAKTKKAIVTLTADSKDIEIFAGLMGIKTYNPYTPSRRNMTGSDFSEITKTTPEKALTTSLKKNAGRNNQGKITVRHHGGGNRRKYRVIDFKRNSKDGIPAKVVGIEYDPNRTANIALICYADGEKAYILAPAGLTDGMTVMSGATAEVRVGNCLPLENIPVGTQVHNVELHPGKGGQMVRSAGMSAQLMAKEGKYATLRLPSGEMRMVPLNCRATIGVIGNGDHNLVNIGKAGRKRHMGVRPTVRGSVMNPNDHPHGGGEGRAPIGRPGPCTPWGKPALGLKTRKKNKSSNKMIVRRRDGKALKMARSLKKGPFADESLLKKVDAMSKAGDKSVIKTWSRRSTIFPQFVGHTIAVHDGRKHVPVYVTEDMVGHKLGEFVATRTYRGHGKDEKKSGVRMAKGHRSKIKRERNEVKDTRPSAKLSYARVSVQKACFVLDAIRGKDVQTALAIVSYNPRYASSVVKKLLESAIANAENNYPEKNYKLENLYVAECYANKGPTMKRIRPRAQGRAYRIEKRMSHITIVLDEKMGQKVNPHGLRVGVIKDWDSKWYAEADFADFLVEDYNIRTYLKKKLYAAGVSKIEIERASDRVKVIIYTAKPGVVIGKGGAEIEKIKGEVQKFTDKKLVVDIKEVKRPDRDAQLVAENIALQLENRVSFRRAMKSCMGRTMKAGAKGIKTSCSGRLGGADMARTEFYSEGTIPLQTLRADIDYGFAEADTTYGKVGVKVWIYKGEVLPVRANKEGGANMLMPKRVKHRKQFRGSMTGKATRGNTITYGEYGIVALEPCWIKANQIEAARIAMTRYIKRGGKVWIKIFPEKPVTQKPMGVRMGKGKGSLEYWVAVVKPGRVLFEISGVPEDVAKEALRLATHKLPCKCKVVSRADLEGGVSNENMKTSKYLEELKTQSVADLSAQLVEAKKELFNLRFQNATNQLDNTSRIKEVRKNIARIQTIITEKEKVAQMEERNLRKTRVGIVVSDKMDKTITVAIQDNVRHPLYNKIVKKTYKLKAHDENNECKIGDKVRVMETRPLSKDKRWRLVEIMERAKMVQQESRLKVADNTGAKELLVIRVMGGSTRRYANIGDVIVATVKDATPGGVVKKGDVVKAVVVRSVKGARRKDGSYIKFDENAAVIIKDDKTPRGTRIFGPVARELREKQFMKIVSLAPEVLMATMKIKKGDMVKVIAGKDINSEGKVIAVNRKDGTVLVEGVNMVTKHTKPSMQNQQGGIVHQEGPIDISNVMYLHNGKPTRVGFKMDGDKKVRFAKSTGEVIDMSRLKEQYQNEIVDAMIKKFGYKNIMEVPKLDKIVVNMGVGEAKENAKLLEAAIKDMEAITGQKAVATKAKNSIANFKIREGMAIGCKTTLRGEKMYEFMDRLINLALPRVRDFRGVNPNAFDGRGNYALGIKEQLIFPEIEYDKVDKVRGMDIIFVTTAKTDEEARELLTQFNMPFAKMAKTSMKVKQQRKPKFSTRAYTRCKICGRPHSVLRKYGICRVCFRELAYKGQIPGVKKASWMTTSDPIADMLTRIRNANTAKHDTVDVPASKMKIAIADILVDEGYIAKYDIVEDGNFKTMRITLKYGADKNEKIITGLKRISKPGLRVYAGKDELPRVLGGLGIAILSTNQGIITDKEARKLQVGGEVLAFVWMSRIGRMPIAVPAGVTVDIAENNHVTVKGPKGTLERTLPSEMDIKLEGDEVIVTRPNDLKKMKSLHGLTRTLIHNMVVGVTDGYTKELEVNGVGYRASKSGKVLTLNLGYSHPVEMTDPEGLESKVDGNKIIVSGIDKEKVGQYAAEIRDKRRPEPYKGKGIKYADEVIRRKVGKTGKKMVSKKSRTAVRENKHRRMRHHLVGTAERPRLAVFRSNNHMYAQIIDDTVGNTLVSASTLEKDVKAELEKTNNVEAAAKLGTVIAKKALDKGINTVVFDRGGFIYQGKVKALADAAREAGLEFMKREIIDASQLELEEKVVSIKRVTKVVKGGRNFRFTALVVVGDGNGHVGAGLGKAAEIPEAIRKGKEDAMKKLITVKLDEVDSITHDVIGKHTGASVLLKKSPDGTGIIAGGPARNVCELAGIKNIRTKSLGSNNKQNVVLATLNALSQLKSPEEVAKLRGKSVEEIVGMAEKKLKVTLIKSTIGAVPKNKKTIEALGLSKLYKTVELPDNAATAGALRKVAPYVKVEEVMDLSNLQGAAGSTQSDNFRRGRGHGSGNGKTAGKGHKGQKARSGAPRPGFEGGQMPLYRRLPKRGFKCRNSKTIIGINLSALEAFEDGAVVSVETLIEAGVVKNPRDGVKILGNGELTKKLTVQANAFSASAKEKIEALGGKAEVIMLETLRNAFKIKDIRKKIIFTFLMLIVIRIGSCLPIPGVDSDVFANWFASQTADGMGFFDAITGGSFYRMSIFALNITPYITSSIIMQLLTIAIPKLEEMQRDGEEGRKKIAEITRYLTVALALIEAVAMTIGFRRGGYLEFSSGYQGVLDIIMVIFTLTAGSAVLMWIGERITEKGVGNGISIVLTINIISRMPDDIKTLYDQFISGKNVPKAILAAVIILAIIVGMVLFVVYLQGGERRIPVQYSKKIQGRKQVGGQSTYIPLKVNTGGVIPVIFAQSLLQTPVIIASLLGKGNGTGIGSKILRGMSQSNWCNPSEPIYSIGLVVYIVLIIAFAYFYTSITFNPLEIANNMKKAGGFIPGIRPGKPTSDYLNRILNYIVFIGAVALAFIAFVPIFFNGVFGADVSFGGTSIIIIVGVVIETLKQIESQMRVRYYKGFLNDMKIIMLGAPGAGKGTQAKQIADKYSIPHISTGDIFRANIKNGTELGQKAKKYMDQGLLVPDELTCDLVMDRIGQEDCKNGFVLDGFPRTIPQAEALDAALVKIGQKMDFAVDVDVPDENIVNRMSGRRACLNCGATYHIVSIPTKVEGICDRCGNPVVLRDDDKPETVQKRLKVYHEQTQPLIDYYKKQNILKSVDGTQPMEKVFADIVAILGEMSVTIKSPQEIELMREAGKILAKVHEQLGKELKPGMSTLEVDRLGEEMIRSFGCEPSFKGYQGYPASICVSINEEVVHGIPRADRIIEEGDIVSLDAGVIYKGYQSDAARTHGVGEISDDAKLLIERTRQSFFEGIKFATTGNHLHQISAAIGDYAGSFGYGVVRDLCGHGIGKHMHEDPEIPNFRQFRRGIKLRPGMTLAIEPMVDLGSAEVVWMDDDWTVVTEDWSLSAHYENTILITDGEPEIFTLTESEIATGRWNQYLGRQTEAMIEFAKSMAGHDRNHIYLVTGKDERFVYLADGNVKLLAEPKKKNRKHIQIIHRLPDEVLGCLEQEITDLTVKRAIKAYVRILKERAESMSKADVIEVEGTVVEKLPNAFFKVELENGHQILATISGKLRMNFIRILPGDKVTIEMSPYDLTKGRIIWRDKMRLHTEDAGENHPEYERIARAHISGRRTTELPQQILERKSHDVKWLALRRGLSSGQSQESENNKMRSVYHRHHMNQWRLKSTWLVSQVMARIAGVDLPREKRVEIGLTYIYGIGRTSSNRILAEAKVDPNTRVRDLTDDEVKRISAVIDESQTVEGDLRREIAMNIKRLQEIGCYRGIRHRKGLPVRGQKTKTNARTRKGPKRTVANKKKMAKVTKKVTKKRVKKNVERGQAHIQSSFNNTIVTITDAEGNALSWASAGGLGFRGSRKSTPYAAQMAAETATKAALVHGLKTVDVMVKGPGSGREAAIRALSACGLEVTSIKDVTPVPHNGCRPPKRRRVMAVNKVPVLKRCRSLGLEPSYLGYDKKSNRELKRANKKVSEYGLQLREKQKAKFIYGVLEKPFHNYYVKADQMKGMTGTNLMTMLESRLDNVVFRMGFARTRKEARQIVDHKFVLVNGKQVNIPSYLVKAGDVIEIKEKNKGLQRMKDIVEVTGGRLVPDWLDVDAEKLQGTVKELPSREQIDVPVDEMLIVELYSKMFDFQKPKIEIAEISEDKKYGRFVVEPLERGYGTTLGNSLRRIMLSSLPGAAVSQVKIDGVLHEFSSIPGVKEDVTEIIMNIKNLAIRNNSSTNEPKVAYIEFEGEGVVTAADIQVDSDIQILNPDLVIANLNGGADCKLYMELTITKGRGYVSAEKNKTEDTPIGVIAVDSIYTPVERVNLSIENTRVGQITDYDKLTLDVYTNGTLEPDEAVSLAAKVLSEHLSLFIDLSEAAQQADVMIEKEDNAKEKVLEMNIDELELSVRSYNCLKRAGINTVEELTNRTPEDMMKVRNLGRKSLEEVLAKLKELGLQLNQGEEMAKYRKLSRTSSQRKALLRGQVTALLNNGKIVTTEAKAKEVRKIAEGLIAMAVREKDNFEEVTVKAKVARKDKDGKRVKEVVDGKKVTVYDEVEKTIKKDKPSRLHARREMLKVLYSVTEVPTDAAGKKKNTKEVDLVAKLFDEIAPKYADRNGGYTRIVKIGQRKGDGALEVLLELVMDRDDNRKMDEGLQGNEKIEQAIRELQQAPSGEELAHTLTVVRRRMKEGGQFIVAVEPPRGDGKIQIQAIQTADGQQWWAAFTSFEEELKGSGSVMSTFLSDMEKLFTAALGTEGINGVIVNPWNRTLMMDKNLIQIVLGNQHSMAFGIAFENGIRYDGRTGGEAHKPRTDRMEKEFKLETAPYSGMAENGMICYKGVVFTCDTENNRICLGDTTDLKKCINIPLAGGGSLLVNRDNLDELSRAIGMFSPEDVKRIMQAIAQDTKVQQMQKELDDEKNSIGNLAAGEMNIKVQACGFVLLVILYLLYHQQHTLQTYSRRAFLRFYAVTVLCILMDILSIVAIESASHLPALFVTFVCKTYLITLVLTALCGVMYIGVDILLSNKAFRKTEHLILLITSVICLSIYLLPISIYCDPVTHIVYTYGSSALMTYLGAVGLILLNFALILKYCRQIRVRRRTGMLLWMLVWILSAIIQFLNPEILVVGFGSCLGVVIIYLQFENPEINLDRASGMYNQTAFYEFIHQIYYDRSAYTAFVFINDHRFSGDDSQQTMQDLAKKLLSTDGAYIFKTADDEIVMLTPASMWNHADTASIQKFALDTYLSASSGSNLKILFLEDCLLTPCQEDFFSLLRYCRRTKIKQTVQRFIPVDSSVAAHMYAENDLIQKIDDAISQNRIEVFFQPIYSTRQKAFTCAEALVRMYDAHGDLLPIYDSICAAEESGRIHQIGEIVFEKVCHAIRNEQLAQYGLHYIEVNLSVAQCSDEKLAERYIRIMERYQIDPSNINLEITESATMEMKQTLLTNMEKLISYGVSFSLDDFGTGQSNLNYIVEMPVQIVKFDRVMTQAYFSSQKGRFVMNAAMHMIQDMKLGIVSEGIETQEQLTAMEQLGIDYIQGFYFSKPLPLPEFLAFIKKQECKRTLSISAAVPDPVMDMSLLQTKMKPATPLPELQTVEDIYRWIDENIAYGWQDKDGGTHTSEMKDFRRLYRTMSVTETLRQKIGTCIEQVALMHELLDAIGIPNQMYCCRIFEPDDYGNLEEEEHMHCFLLYFQNGKTYHMEHPNVEQKGIYEYPTEEAALRTITEYYVKLRGGKESPTTCFSGVPAGVSFREFNAFINHLAMAKYVCTVCGYVYEGDAAPEFCPVCKAPAEKFKLQEGEKVWAAEHVVGVAQGVSEDILSDLRANFEGECSEVGMYLAMARVAHREGYPEIGMYYEKAAYEEAEHAAKFAELLGEVVTDSTKKNLQMRVDAENGATAGKTDLAKRAKAANLDAIHDTVHEMARDEARHGKAFEGLLKRYFGMLKYSKQRESIKNFLVTRYDHPTAETVYLNIRREFPNISLGTVYRNLNLLAEIGEIQKLSPGIGPDRFDGNPALHYHFICRHCGCVMDLTVSGLDHINILAGQDFDGEIEGHITYFYGACPSCKASEKCSSMRYILSLKLVIVTDIILHAQKEFVKRKIGIIIIFRKDSIYGMRAYIMAGMKRFVTYIYAYEEEKKGSNVGFARIEIRGQDARIEIHLRGVYAASATCRVYLFQREAAGGKEATGVTGVLVGEMKLANGSGDGAVVLKGGRVGASPYGITEMEGLFFVIGEERILMSRWREGAPFKVGLSGFREWQPDEPKEKAAEKGAAAETAAQKEVREAAAAQAEQNSQTAAQEMAQRKQGGAAPVQSEQNSRMAVKGMPQKERRETVAAVSEQKEQTPAQDVPSGSGMETAAVGEETEAIHATELPMRNLFPEYDWNAVWEELCREHKPAALFEEWDTQCIQLELKDLRSLPKKYWYLGNNSFLLHGFFNYRYLVLGRTAEERWFLGVPGVYQRQERVMAAIFGFPEFFAAGPGDERGEGREPVNHFGCWVRYIEEMNCNNHITGSLPVHTMYTTDRLILKILTPDDTNEVLAFQCRNRELFERYEPTRPPYFLTPAHQQAILKCEYDLARKCASIRFYVFLKINPRIIIGTVCLHDILRMPYCCSEIGYKFDAAFQHQGYAREAVTKVLNIAFTDLSLHRVFARVMPENTPSLRLLEVIGFTCEGTEYACTQIQGKWEDHIRYALLNPYSSMMTQEEKYMKAAIREAKKAYALEEVPIGCVIVQNDRIIARGYNRRNTEGNTLAHAELTAIKKASKKTGDWRLEDCTMYVTLEPCQMCAGAIVQSRMKKVVIGSMNPKAGCAGSVLNLLQMAQFNHQVEIERGVLEEECSTMLSGFFRELRDKKKSLRENVMWDKARKILYRGGEILELLMAAAVVAGILVAMITLVPELARYWEHRTTAGAFLEYLDAVFNVVIGIEFLKMLCKPSSANIIEVLIFLIARHMIVQTTTPLEDLLSVVSIGILFFFRRFMLMTKPDKDQHVPKLFGVIKASQSSGTAQAEHVDAEKNAEGSKGAGEKMHDGVVCWELEMTNKKHNPSCIYFRTSIAFCKKRYIIKAMFGFGQLIDILKKDPKKIVFTEGNDPRILEAASRLLAGTFLHPILVGNPDEIFKAAEESGFNIRGAEIIDPANYDRFDEMVDLFCELRKSKGVTPEQAKGILSQANYFGTMLVKMGVADALLGGATYSTADTVRPALQLIKTKPGNSIVSSCFILVRPSATGENEVLAMGDCAINIHPTEDELVEIAGESAECAKIFGVDPKVAFLSYSTLGSGKGEDVDKMRNAAAKAKAKYPSLPIEGELQFDAAVSPRVARTKCPGNEVAGHANTFIFPDINAGNIGYKIAQRLGNFEAYGPILLGLNAPINDLSRGCNASEVYSMAIITAALAMEALLFTREDLKKLIVPLIIEQALALSIGLFDTLMVSSCGEAAVSGVSLVDSISVLLIQILSALATGGAVVCSQYIGKKMPERAKLSAGQLMFIMLVSAGTVMVVILLSYRFLLRAIFGQIDADVMQNAEIYFIISAISYPFLGVYNAGAALFRAIGNSRVSMYTSLVMNVINIGGNAVLIFGFGLGVMGAALATLTARIVSALVMVVLLSRKDNPLCIATPGCMKPQRDVIGKILKIGIPSGVENGMFQIGKLLVSRLTATFGTAAIAANAVANSVAGFANIPGIAIGLAIVTVIGRCIGAGEKEQARYYSKRLLGLAYAGMVLADLALFVLVKPIIACFALSAEAARIATQLLVSFAVCAALIWPLSFTLPNVLRAAGDAKYTMEVSVFSMWVFRVASSYFFAGTMGLGVLGVWIGMYVDWAFRTLLFVIRYRRGKWLEKRVVMYKNMGKVKRTLEEYVILTVATLILVVGVYVFKFPNNFSFGGVTGIAVVLSAVMPATPGNITFIINMALLVVGFIFLGKSFGIRTVYVSVLMSVGLSLAEVWFPMEHPLTTQPVLELMYAIVLPAFSAAIMFNIGASGGGTDIIAMILKKYTKLNIGGALFLVDLGIVIASCFVFDAQTGLCSLCGLLAKSLVVDNVIESINLCKYFTIICNDPEPICDFITNELHRSATIYKAEGAYEHNQKTIIITIMKRSQAVELRNYIRIHQPTAFIAITNSSEIIGKGFRGFNMKIWEDERQCYIRAAMEKNSEAENEALKAQLDAIDWSVLEQIERKETVNERGVFAPLEAVEMEEIERRRDEFRELGIKAIREGKVGAVLLAGGQGTRLGLDRPKGTLNIGIHRELFLFQQLIRNLMDVTDEAGAYVPLYIMTSNINHDDTQAFFEEHGYFGYPKEYVKFFVQEMEPACDHQGRVYMESRTRVAMSPNGNGGWFGSMVNAGLLSDIRSHGIEWINVFAVDNCLQRIADPLFIGATIAYGCESGAKVVRKAAPDEKVGVLCTEDGKPSIAEYYEMTQEMATARKANGDLLYGFGVILNYVFSEKRLEEIADAHMPIHVVEKKIPYMDESGSMVKPDAPNGYKFETLVLDMVHMMADCVPYEVDRKREFAPIKNLHGVDSLDSARELMQGCGIELMEEQGKQQEIEIEEVTAQENVIAVRDLVPMRAAMDDSMERIADMKDQFSQTIDPILRMYNAAMCATTARLEIIEDEFKYRKLRCPIHHIDTRLKSAKSILGKLQKKDLDLTLSAACNNIYDIAGIRVVCSYIKDVYLIRDRLMAQDDVMIMQIKDYIETPKENGYRSLHMVIRVPVYFMNKKQLVPVELQIRTLAMDLWASLEHDIKYKCLYQTETENFSEELKECSRLIYEAEEKMEIMNRTLEAMREKQNPVEKEWAAVVKAEERFLRHAMPARTAGWQEKITRYVPQKLEATLHTAFYKAFELIFDKGTPVIEKTYQREKKEQNYKINAYAAEVRDTRHALRAFGREAGASRNLNLAVSAVEGVGMGFFGLGLPDIPLFLGVLLKSIYEVALSYGYTYDTQEEQIFILKLIETALSHGEQLAQNNMELNLWMREERTFSVSRNEQIRRTSDALAGELLYLKFVQGLPVVGMVGGVSDMVYQKRISDYAAVKYKRRFLETKRKTGEEKRHPAGMASYVSPEIRDRFDTLSADLKNLILERNVCLNNMYDLIHVLEDIVAEGEAEMNEKIYCRIRRVRAVFLTFFLTAAVVLTDAQNIREKEYEKTEIIYCIGDSITYGSGLEDEERLTKSYPAQLGIRLGPRYLIFNYGVRGATLQDLSRKSYRNMGYLNVIEAQSPDVVIIMLGTNDSKQKYWDAERYEEQYLALIDELHNLPGHPYLYLMAPPEAFPAEEGEILYGINNDVIGGEIRNLVPDIAEQSGCGTLDLYALTQDHPEYFVDGIHPTEEGYALIAQMVADQIRADRNAGVWMENKTREAIRFEGSVQGVGFRYRMSQLARHYDVTGWVRNEYDGSVSAELQGRREAIDEIIARLREDSYIYLDRVSRQKLELNEEERAFSVRYMKRIGMLTSGGDCQALNAAMRGVVKGLSENVDELEVYGFLNGYKGLIYGDYRLLTSADFSGILTKGGTILGSSRQPFKQMRVPDANGLDKVEAMKATYHKLNLDCLVILGGNGTQKTANLLREEGLNIIHLPKTIDNDIYGTDVTFGFQSAINIATDCIDCIHTTAASHNRVFIVEVMGHKVGWLTLYAGVAGGADIILLPEIPYDIEKVIAAINKRTKAGKGFTILAVAEGAISKEDAALSKKEYKEKVAKRKYPSVSYEIADRIFKETGVEVRVTVPGHTQRGGSPCPYDRVLCTRLGSAAAKAIMDENYGNMVAMVNGKIKYVPLGDVAGKLKTVDPNDQMIKEAKRIGISFGDMSYQALYRKFRPQEFDDVKGQDHIVTTLKNQIKADRIGHAYLFCGTRGTGKTTIAKIFAKAVNCEHPVDGSPCGECPTCRAIAAGNSMNVIEIDAASNNGVDNIRQIREEVEYRPTEGKYKVYIIDEVHMLSIGAFNALLKTLEEPPAYVIFILATTEAHKIPITILSRCQRYDFRRISIDTITARLRELMDAEQVTVEDRALRYIAKAGDGSMRDALSLLDQCIAFYLGQELTYDKVLDTLGAVDTEIFSRLLRQILDKNITGAIQTVETLVIEGRELGQFVTDFTWYLRNLMLVQSSDDMEDVLDISSENLALLKEEASMVDADILMRYIRIFSELGSQIKYASQKRILIEIAVIKLCKPEMEKDYTSLVDRIDSLEKKLEKGVVMAAPGSARQGVGGSAQGAQGGSLPKAELPKAIPEDVKQVLTNWGGILSQLTGVTKTYLKMATRSLGPNGELMLVFDDKNAYEYVEQNRSDCQDALKAAAADRIGKEVAILVKLNDTGHASDEVYPDLGALIQMDIEEEDFMAKRGGFPGGMPGNMNNLMKQAQKMQRQMEEAQKELEEKEVTAAAGGGAVEVTVSGKHEITKVKLSPEVVDPDDIEMLEDLIMAAANEAYRQLDEFSQSSMAKITGGMGGLGGMPFMIFSSPCLSADGIYPLKLQCHKTKLHPYSAIATQVQLMFHGTAVSDRHCRLLISNVKKHVILISGRNATFFEQNFHMHSAMKETIATIPLMNAFHADDECPFCYLEREAEQHAISFILGSAYMEDDIRAKTDATGFCRHHFKMMYDYGNRLGNALILSTHLKKLNQELGDELAHFTPGKSSFIKRMKHTDVSSGNAPKTPLGAWIAAKTTDCYVCDHFHQIYGRYLDTFFDLYKKNEEFRALFEKSRGFCLPHFGDLIETAEDKLTDDEKKEFYPKAFSLMQENLDRLQKEVSWFVEKNDYRNKDKDWGTSADSIQRGMQKCAGGYPADEVFKAKLMEYYSRQISKLIQELSALPGIGTKSAQRLAFHILNMPKEQVEELSSAILDAKQNVRYCKECFTLTDEEICPICSDSSRNHKVIMVVENTRDLAAYEKTQKYDGVYHVLHGAISPMLGIGPGDIKLKELMQRLQKDVDEVIIATNSSLEGETTAMYISKLIKPTGIKVTRIASGVPVGGDLEYIDEVTLLRALEGRTELMTNLELQKTANEIRKSIVTAVHSAKAGHPGGSLSAADIFTYLYFEELNIDPKNPKMADRDRFVLSKGHTAPGLYAALAERGFFPKEDLVTLRHTGSYLQGHPDMKHIPGVDMSSGSLGQGLSVAVGMAAAGKFDKKDYRVYALCGDGEIQEGQIWEAAMWAGFKKLDNLVVIVDNNNLQIDGSIDTVCSPYPIDKKFEAFNFHTININGNDFDEIRAAFAEARATKGMPTAIIAKTLKGKGVSFMENAVDWHGKAPNDDEYKIAMEDLEKAGAALCQNMSELGKKIATRESYGNALVELGKEHEDLIVLDADLAGATKTGIFKKAFPERHWDIGIAEANMTGIAAGLATCGKVPFISSFAMFAAGRNYEQVRNSIGYPHLNVKIGATHAGISVGEDGATHQCLEDLALMRAIPGMVVLNPADDVEARAAVHAAYDHVGPVYLRFGRLAVPVFNDEATYRFEIGKGIVLKEGKDVSVFATGLCVNEAREAEKLLAADGIDAEIINIHTIKPLDEKLVLASAAKTGKVVTIEEHSVIGGLGSAVCDILSEKQPTKVMKIGINDVFGESGPALELIQKYGLDAQSIYEKVKAFVKQNMIEIIHQEQTEEKVQRELPREIKQIGSPDAGERIYVEDTVYRRMHPHGGVEEKTAYVLLGKFENCMGRECTFVEAVIPLNEILFDRDIPVWDDHTWAYIYKQLKPEHDPFVIVGWALDIKGQLPNMTAHLEALHQRNFGGKRQILFLMDSLECEEAVYGSRNGHLYRRDGFYIYYQHRQVPEENDLWKKEEKEFYREMDVEGEEKPKPAVPVSAGEREAPADMEKTSDDNESAGIYRDLYRRRIQQEAGRQEARERPAYAATVLLGAVVCVLGVTAYLNHEKMAEMEQTLAQMKGTRYVTEAQTADAETEETERMPSVAVETVMGNVEKQELSAEAAGMQEDVTAQQAETAQGAQGTAESAENVTANAAAGTAAGSETAGDTAAAGGQACADAAGTSVEAQTQGTASTDGSLAAQTQGTTTAAGNASVENTQEAAAQTAAQMYLSQGYYDVQKGDSLVGICRKIYQTTAMLDKLCEVNGIEDENAIYAGQRLILPNMAEKNKSGFHTVGDTDMEEYNRKIKEHRRKVLRRTVIVTAVILLVLTGLGLYMALRHYENYDIMSTAERSDTDATHFTEFQGNILKYSNDGAFYLDAANELIWNQTYEMSSPKLDTCGNYLSIYDKGGTKIYILTPTKLVGSIETTMQIQQVCVAEQGTVAVLMKKDKAAYLALYDREGNSLAEGEIHGQNGGYPIAIALSNDAVKLAVSMININEGSVKSTIAFYNYGTVGQNEIDHCVGVNNYDDMVIPEMEFTSNDRMVAFGDTKAVIFEGAQKPQAIAEIPMDEKTKSIFYNEHYIGIVTGNEDEAVTNHLAVYDENGKLVMEKDFGLDYSSIEFLTNNEICIRNANVCDIYTVHGVYKFHHEFEEELFEIIPGKLKLNYTLVLKDTTQRIRLKMNWVLMLVLLVLVCCAIYGYTKGFLRIVFSLVAWVIVLVFVSWATPHVSQWIQENTTIYEKIEAACEESVRRAAQGKMEEGAVEQYGEAGELGLDLPESVMAQIVSGASGVADTVLAETGVYAGIAQSLAGFIVQGIAFVTVLILSWILVHVISALLGIVSHIPILKGVNRFTGMLAGLMQGLLIVWIAFYIVALCSAGETGRVIVSYINQSAFLKELYENNILLSLGTGFARMKKYYEEAKYNAAFDRCVDVMSQMLQKYGHQVLDKLEQDTPQTVECSKDDKQAQLLTDKAADLETPADVAKVQEHNEREKDSYSNQDVVPERTALNVHFKSPTDDYVKMFEQMEQDGVISTRGLKPDAVKYGELIFDVNSAYFYNHGGYEFAKQFYADAYKAAVEIVGGEQYILSAVMHADERNRAMSEALGEDVYHYHLHVVYIPVVEKQILWSKRCKDESLRGTVKETITQVSRSKKWESKPVLDKDGNPMLNAKGKKILKSSYSVLQDDFFHFMRNAGYTDVERGERGSTEEHLTVTQFKVQAEQQRLEAVTGQVAQAKRGLENAKAATEKQKKKLEALQKETKTAKTVALTVQEIETMGKKATFGNNITLTPDECDTLKRYAVNGIIANADNKRLKEKLASAEKTVSIWKQRYEAVSEKYMELKQKAQPFLDALEIASERVRAFINSILIRGKETQEHKHPAQKRGQDMELMAKGSVRKKGKKWYYRFYVEDASGNLVQKEYAGTESKSETEKLLRQAMDDYESKKFIAKSENITVGELLDIWAEEELKTGTLSNGTVQNYLGAITNIKKHPISERKLKNVTSEHLQAFFDLLSFGGTYPDGSERKGYSKDYIRSFSAVLQQSFRFAVSPKQYITFNPMQYIKLKYQTDEVDLFSDDDMDGGIQPIPREDYERLIEFLQDYNPPAILPIQIAYYAGLRIGEACGLAWQDVNLEEQCLTIRRSIRYDGSRHKNIIGPTKRKKVRIVDFGDTLAEILRNARKEQLKNRMQYGELYHKNYYREVKDKNRVYYEFYHLDGTENVPEDYKEISFVCLRPDGSLELPSTLGIVCRKIAQKLDGFEGFHFHQLRHTYTSNLLANGAAPKDVQELLGHSDVSTTMNVYAHSTRKAKRESAKLLDKVAGNDMEYSKEDLMEAKKQIWGVGENMGTEESKKIWEENAQFWDNAMGDESNEFHREVVRPKVTELLSPNPADYILDIACGNGNYSSYLAQRGASVVAFDYSKKMIELAKRRQSQYAKQIEFCVADATDRKSILELKRNRAFTKAVSNMAIMDITDIEPLLMAVYELLQESGIFVFATQHPCFVTLTEKYMTPHSYYDIAIEGQPKEQIYYHRSIQDIFNLCFRAGFVIDGFYEECFKTNKEIPMVMIVRLKKVKRDSLKMKIINIGILAHVDAGKTTLTESLLYASGAISEPGSVEKGTTRTDTMFLERQRGITIQAAVTSFQWHRCKVNIVDTPGHMDFLAEVYRSLAVLDGAILVISAKDGVQAQTRILFHALRKMNIPTVIFINKIDQAGVDLQSVVQSVRDKLSADIIIKQTVSLSPEIVLEENTDIEAWDAVIENNDELLEKYIAGEPISREKLAREEQQRVQDASLFPVYHGSAKNGLGIQPLMDAVTGLFQPIGEQGGAALCGSVFKVEYTDCGQRRVYLRLYSGTLRLRDTVALAGREKLKITEMRIPSKGEIVRTDTAYQGEIVILPSDSVRLNDVLGDQTRLPRKRWREDPLPMLRTTIAPKTAAQRERLLDALTQLADTDPLLRCEVDSITHEIILSFLGRVQLEVVSALLSEKYKLETVVKEPSVIYMERPLKAASHTIHIEVPPNPFWASIGLSVTPLSLGSGVQYESRVSLGYLNQSFQNAVRDGIRYGLEQGLFGWNVTDCKICFEYGLYYSPVSTPADFRSLAPIVLEQALKESGTQLLEPYLSFILYAPQEYLSRAYHDAPKYCATIETAQVKKDEVVFTGEIPARCIQAYRTDLAFYTNGRSVCLTELKGYQAAVGQPVIQPRRPNSRLDKVRHMFQKVMMLIFWSLVRNSVVLAVYLLFSVACFLTVHEHCSAYLNEHYELTEEEIKEVMDGYDPSYKDNQSNLERMMQERAFSHLTEMICKKCGYDYPAKELKCPYCGEPNPLGEKWRNEENLARKETLLAKAKIIHSMPLYVADKVMNVILLVVVAVTALTFLVLAIVFGLEGIHITRQHNQASVQEAEELLVAGDYTGLYDYLKSHQVYGQEGFKKYTERVRLYDDDQAFMRDLFRIQEVLDWPAGQQISPNDVKYVLWAGKNILGRETGDSYRKLEYEENKEYYNDMKQDVAAALLGTFGMSEEELSELMGMERDSEKVDELVRRIFEREGWEYEEDMKKIKNLKMMWKFSDETGNYEVSMPMLAVKAAGCVIALFFVFSVLWALIATAVDEGKYSGDAYHLDWCERKYIERNYSGLYNTLDLYGLTSDKYASYWEMVNGYRDHTLYDAYRALGETGIDEVSYETENGTATLSIPVEEKRVFYGRKVLDNASTCEFEENQRYLTKFADEVEMLDKIYVVYWSQSGNTQAMAEAVGAGITAAGKEAAVVDVSSVSTDELKNAKAFALGCPAMGAEVLEEGEMEPFVTEVEGFAAGKTIGLFGSYGWGDGQWMRDWVDRMSSAGANVLNGEGVICKEAPDDEAVAACTDLGKQLAAVMSVVIVGGHDRMVCQYKKICKEHNCKAKVFTQMPAKLGNQIGSPDLIILFTNTVSHKMVRCAVAEAERCNADVVRSHTSSGSALTEILERVCGMAEEKECCCSHKTKERSEKEYKDMIHRLNRIEGQIRGIKGMVERDAYCTDILVQVAAVNAALNSFNKVLLTNHIKTCVTNDIREGREETVDELVTVLQKLMKMKQYTVTGMSCAACSARVEKAVSKVPGVTSCSVSLLTNSMGVEGTAAPQEIIRAVENAGYGAAEKKRGGAETAGAAEAMPQEEMLKDRETPLLKKRLVTSVGFLAVLMYFSMGHMMWGWPLPAFFEGNHVAMGLVQLLLTVVIMVINQKFFISGFKSLWHRAPNMDTLVALGATAAFGYSTYALFAMTDAQVRGDMDGVMSYMHEFYFESAAMILTLITVGKMLEARSKGKTTDALKSLMSLAPKTATIVRDGVEQEVPVAQVKKGDVFVVRPGENIPVDGIILEGSSAVNEAALTGESIPVDKAPGDEVSAATVNQSGFLKCEAMRVGEDTTLSQIIQMVSDAAATKAPIAKIADKVSGVFVPTVIGIAIVTLIVWLLAGKPVGFALARAISVLVISCPCALGLAAPVAIMVGNGMGAKNGIMFKTAVSLEETGKMQIVALDKTGTITSGEPRVTDVLPAEGVPAEELLHAAGILEQKSEHPLAKAVLAYVKEQSGAKEQSGGKRASVADGASGGEDGSDMLTDFMALPGNGLTGVWDGSRLYGGNLTFIEQHVKVSDAAKRQAEQLAMQGKTPLFFAKDEKLLGVIAVADVIKEDSPRAVAELQNMGIYVVMLTGDNKRTAQAIGKAAGVDEVIAGVLPDGKEQVVRELQKKGKVVMVGDGINDAPALTRADIGMAIGAGTDIAIDAADIVLMKSRLSDVPAAIRLSRATLRNIHENLFWAFFYNIIGIPLAAGVWIPLFGWQLNPMFGAAAMSLSSFCVVTNALRLNLFRMYDAGKDRRIKNAVTGQTAAAAAKEPDDALEKKSETNQKKENETMKKTMKINGMMCGHCEARVKKALEAVEGVQEAVVSHESGNAVVTLTSDVADEVLKKAVEDQDYEVVSVESMRYVPLKKAEPGMVLAADLYDSVGRTLIGCHCELTESYLEKLEAYGFDGVYIEDKLSEGITIESVITPQLRQEGQERIRACDIDGCKLIARRMVEEILSCGNVSLDLTDLRSYDDYTYAHSVNVAVYCGVIGMGMGMSEVELGHLVTAALLHDLGKLQIPDEILNKPGRLTQEEYLIMKSHATLSYQIISERWDISAHIKEAVLHHHENVDGSGYPDGLEGAQQTIFTRILHVADVYDALTSRRPYKEPYAPYEATEYLMGGCGIMFDREVVETLLKYVPLYPKGTMVTLSDGREAIIYENFGVHNLRPVVRLMDGELLDLSNEANYHITLRMKTESGFSTEEAEKERNEMIRPPVRCRIMVVDDMKTNLQMLRGILEPLYDVILMKSGHQALLYLKKHPAPDLVLMDIDMPEMDGIETAKRIMEMTDHTVPILFVTALCDRQTVTLCRNLDAAGYIVRPYKPVFVKTEIKRILMGRSEIEMILLVQIICLCYTLYVLQEYATSGAYSRQHRLLPLLVGLIGVYNFYQVVLTLTGQTELFGRLKDMLLIQVLYLILIYIMDFLKIHIPYGVQWIMFCVLLALNVIVFMRYRQPEIYHIYFRIYLIGCTAAIVAMGTYAYLRRSLTMHEHQIANLLYIVLLVNAAAMCAEKFFTIPGNLLMLAATTGVCGAVHYLIQTDQLMDTGELLRERLYDDSDTAVVLLDTNFYCVDANRSGRSLFAGPMQLYERNSRRHRGYMQEAEELAKSIQEGKKSREIEKNGQYYQCQCTPVYYSGRLRGYILGAWDITSPKKETQLMQALKGKAEMQTARKSDFLAQMSHDLKSPLHAIIGITDILSSRKELTASDRALLLHIKGAGNSLVEQVNAILDYSRIEAGKFELMAECYRLDQVLEEVAHMCVINLQSKRVWFEACIQGEFPEKMYGDAMRVREILQNLLANAVKFTEEGEIRCVITCEAIRDSSDVMIRCRVSDTGTGMTSEQLRQGFDSYVSYAAESGQSGNGLGLSIVKELANRMGGSVRAESNGTRGTTITVEIRQKVCGSTLHDAVCYTTDSLLRESVVYTERIQPTWIYPGAHVLLADDMRINQEIFQELAAPWRFTLDVVRNGKEAVEAAARKEYQLIFLDQRMPEKNGDEAAKEIRQFCDIPMVLMTADITAELKHRNRRPEFTAYLDKPIDVSELKKVIETYLPVAERRDFLLHAQMNHGAYRRLLQTFLQETGSLSAELPGYVPEQLELFGTKVHGIKGASQQIGRQALSESAEIMEMAAKTENIRYLEKHMTEFLETIRHTLESVEDELKNLPQEIQGEGAATAEDIPEEKQQILAQLREAFDACDLNGIEQGLSRFARAHLTAKERELLTELHAAYENLDYEEGSELLSGRMLMNLAEITHRAYFLDCYPLDERHLKISIQTGKDVDEVILWAGDPYSAGIAENEQNWQGERVPMELERELAHRNVYSAVLTPAYRRVKYHFEITGGGESVCLFEDGFVKNAEHFPEERMIQRFIYPWMNRADIMKVPEWAENIVWYQIFPDRFCRKNPGEKRHSCREWACQEDATWKEFYGGDLAGIRSRLAYIADLGVGGIYLNPILWSDSNHRYDTIDYHSVEPDIGTEEELKALIAEAHALGLRVMIDAVFNHCGAKCALWQDVLEKGPQSDYYHWFCVNRWPIDEQTHATKQGDYFSFAFVDNMPKFDTSEPDVMEYLTGIAKHWVCEWKVDGIRFDVGNEISHAFLKHLRLELKKCNPKLFLLGEIWHDAFPWLLGDEYDSTMNYPFLACVNNFWADKTQSGTDFMHGINQCYSMYYEQVDRVLFNLLDSHDTDRLMERCHGNADTFLAQLAILFTMQGAPGIYYGTEIGMDGGGTKANRKCMPWEEIDAGSFAELTGQVKRLIAMRRQYPQTRSGKVVWDVREDSRLLHYYKKKEGQKTLEVCINAGEEPVRTGERGLPEPEDCLFANGLEHGSLRPQGVFIRLVMENRTPQRDKAVRTRQRLLEATLAQTAACGYHNITVDKIAAAAGVSTGSAYRYFRNKKEMLLAALAYHYENIQDFFGTPDSSLRSFSSPEDMLAYVLGQFYGLHRNIMPSTRNMGKKYKKRYEMHFANPDICEFDMQHEQWLFGDNSWTAPVLQTVDSFMCMPVMIAQPFHIQKMRYISLFEYGGRRTACQGKGAEGIAQKAPDSQNLLCFLFAGVIKMLKVFLAEDEIVMREGIKNNIDWQGEGFEFVGDAGDGELAYPIIQKTRPDILITDIKMPFMDGLELSRLVKHELPETKIIFLSGYDEFQYAKEAIDIGITDYLVKPVTGAQLIGTLKKIGQKIEEERGKQKQQAPEEARSAGRQRLFRHMVSGKHTYASVFQEAKELGLELIAEQYNIMLLQLFSEEKEDVLPEKIKAFEQELEKYMEQSGNLIVAKQSRAEYDFVLKGTGQQSLAETTEQVKSLLAEYFRRETAVEYVAALGTPVERFSELQQCYRQTNLCFSRRYSVERNQILEEETPGETAAEVLEDVKLGELNISSLSQRQAEAFLYTGTREEVSGFVEDYFAQLGDGNVKSIFLRQYVVMDLYVTAVSVLEKSGYKSRDLVERCGDAKEMVAYLTTVEQTREYIKKLFSAVLDLRSEAVDGKYDGIMQKAKTYINDHFEKDGISLNMVAAEVNLSPSHFSTVFGQEMGETFVEYLTRIRMEKAKELLRTTGKKVTEIAFEVGYRDAHYFSNLFKKTQGCTPGEYRSRGMLLLICVVPLTILLAYLLIMTNKISSEYDGIVRRITKANAYNINFKEDMDYVMYIIVVNSERAEELVDTEQPHRMIQAAREVFGELYEEADSEYAANRLSSILKSLDTLEDRVEEIEKDALVTGLYETNMERLDLNIRVLTELIQEQIQYYIYYETTNMEELRMGIRADVESAITAITVILVLILLGAWMVSRRIVRGITEPIQRLCEAAQAAGSGDFAIRAQDEELDELSVLNSSFNQMVEEIGHLVEDIRVEELNLRAAELRVLQEQINPHFLYNTLDNIIWLAESKDTEQVVRMVSSLSSFFRTTLSKGREFITVKEEEQHIRSYLEIQQFRYRDILEYEIAIPEELYEYEIIKLTLQPLVENALYHGIKNKRGGGHIRVSGALCQDVMIFKVQDDGIGMDGARLAQVCAMLRDGEQEPEPEETGGFGLFNVNQRIQLNYGREYGLKIQSTYGQGTEIWVRIPCRAEKIKRKRNISKKITPFEENTAKLMKKKLVSVLMCMAMGATLLAGCGSEEAADSSNTTAADAADADTAADSEAADASDAADAADAADGDVITIGFAQVGHESDWRTASTNSAQSIFSAENGYDLQFVDCDQDSAVQLEAVRGFIEQDVDYIIIDPIVSTGWDTVLTECEEAGIPVIVIDRTIDDSDKYISWVGSNFKNEGLAAGEWLKAYTDAKGISDVNVLVIEGTTGASAQIGRTDGFKEIADANGWNILDSQTGDFTQAGGQEVMESYIKSYEGQFNVVVCQNDNEAFGAMDAMKAAGISYGVDGDVILISFDACTAGLEYVMSGDINADFECNPLAAPFVEDVIKQLESGSTPDKEVYMVEHWYVNEDILSSITVNGEEQELTVVTQEIVDAQYMEHNVVLTMRGITMTFPGVKALDNVDLTLRKGEIMALMGENGAGKSTLIKCLTGINAFDAGEIRVDGIDGPVVNHSTLDAQKKGISTVYQEVNLCPNLSVAENLFIGREPKTKLGTIDWKTMTAKSNRIIKSLDLDIDVTKNLEEYSLALQQMIAIARAVDMDCKVLILDEPTSSLDDHEVEKLFVLMRQLKEKGVAIVFVTHFLEQVYAVCDRITVLRNGILVGEYPIEELPRVKLVAAMMGKDFDDLAAVKSEEKKDFTNVPVVIDAQGMSHKGKIKPFDLQIHKGEVVGLTGLLGSGRSELARVIYGADKNQTGKLFVNGKEAKINAPIDAMNLGMGLLPDDRKAEGIIADLSVRENIILAMQAKRGMFKLLPMSRQNEIADKYIELLQIKTASRETLIGQLSGGNQQKVILARWLATDPEFLILDEPTRGIDVGTKTEIQKLVIELADQGKSLIFISSEIEEMLRTCSKLVVLRDGQEVGEITEELTQGHVMQSIAGGGRNEMSKFKKLVSQPLFLPIFCMILVMAVNIIYDVMAGNFAFNFFTISIRNGVLYGRIIDILNRGSEIAVLAIGMTLVVSCSAGTDISVGSVMSLAASFCCMLLAGYGVSSTNSLAAPLIVGVLGGILMGCACGAFNGFLVSYLNVQPMVATLILFSAARAIGLLLCNNMIVYVRDDSFKIFGGYLGFMPTPIVVAIVCILITSLVLRKTALGLYIQSVGINKKASRIAGINSERIIFLCYVVCGLCAGIAGIVASSRISSADSNNIGLNFELDAILAVALGGNSLGGGKFRLAGSIIGAYTIQAITTTLYALGISTEQAPVYKAVIVIIIVAIQAPPFKAFMKKMSVRRQLAKGGAAMKAKKLNGNTVLLIITIALFFVMYAVGCVIYSNKGFTHLQTFLNILINNAGLLCITCGMTCVMLTGGIDISVGSLVAMDCMILAVGMERWNMNAVLLCILVLAIGIVFGVVQGFCVGYLNIQPFIVTMAGMFFARGMTAVISTEQISISSNAFFVKLANTKISLPFGSYTNNKGVVQVPFIRVSVIVALLVLIAVFFMLRYTKFGRSLYAVGGSEQSATMMGLDVKKTKLKAYVLSSFLCSIGGICYCLNTMSGNVQQALGLEMDAIASSVIGGTLLTGGVGNVIGSFFGVLINGTISTLVKTNGKLLSSWSNIAVAALLCFFIVLQSIFAKIKEKSKMNIFQKRTVGKKGIAAALLASQLLFTAGCGSGEQRETAGQLDTEQTMQQDGCIVVGYVQVGSESDWRTTNTQSFKDVFTQENGYYLIFEDGQQKQENQVKAIRNLILQEVDYIVLDPIVETGWESVLEEAKEAGIPVILSDRRAEMEDDSLYTCWVGSDFAEEGRNAGHWLENYLEKQGRSGETVHIVSLQGTLGSSAQIGRTDGFAEVLQQNENWVMLERQSGDFTQAKGQEVMKEFLEKYEDIDVVISENDNMTFGAIEAIREAGRTIGSDGDIIILSFDAVRDALKAIQTGDIAADFECNPLTAPLVEETIRRLEAGESVEKIQYVEETYFDCEMDLSELLESRPYMNIQKFTQKSVEAINDCEKLAYEYGNQEIEQEHLLVALMRQEDGLIPKLIEKMEIQKEHFMDNAERHLAARVKVSGGQVYVGQDLNKVLIHAEDEAKQMGDEYVSVEHLFLALIKYPNKALKEIFKEYGITRERFLQALSTVRGNQRVTSDNPEATYDTLEKYGYDMVARARDQKLDPVIGRDDEIRNVVRILSRKTKNNPVLIGEPGVGKTAVVEGLAQRIVKGDVPEGLKDKKLFALDMGALIAGAKYRGEFEERLKAVLDEVKSSEGQIILFIDELHTIVGAGKTDGAMDAGQLLKPMLARGELHCIGATTLDEYREYIEKDAALERRFQPVMVDEPTVEDTISILRGLKERYEVFHGVKITDSALVSAAVLSNRYISDRFLPDKAIDLVDEACALIKTELDSMPTELDELNRRVMQMEIEETALKKETDRLSQERLANLQKELAELRDEFNTKKAQWENEKKSVEKVQKLREEIEAVKNEIKMAQQKYDLEKAAELQYGKLPQLQKQLEIEEEAVKKRDLSLVHENVSEEEIARIISRWTGIPVAKLTESERNKTLHLDEELHKRVIGQDEGVTKVTEAIIRSKAGIKDPSKPIGSFLFLGPTGVGKTELAKALAASLFDDESNMVRLDMSEYMEKYSVSRLIGAPPGYVGYDEGGQLTEAVRRKPYSVVLFDEVEKAHPDVFNVLLQVLDDGRITDSQGRTVDFKNTIIIMTSNLGSAHLLEGIDANGDINPECEAAVMDELRGHFRPEFLNRLDEIIMFKPLTKDNIGNIINLLVADLNKRLADREITVELTDAAKQYIVENGYDPIYGARPLKRFLQKHVETLSAKLILADKVREGDTILIDVSGNELTAAVKAMIAGMLICAITAGCGTALPHADGMGETERETKEAQLNSSDETEKIQSIAQAEEQTENSDVEDADDQLAVIARTRNQWVNDPDYADEMYQFAIADLDHDGRLELIVSNCGGTGIYTYSRFYRVEENGTLKELKTSFVEGDSQPDLIADELTVYRKETKETLQEYYIVYDDLRVSPAEHLYATDAMSVLEDEIKVETLATMSWLYVAGNSGDEGEAQIVCKDADGNPLTEEAYQQYAQTYFKKQGYTEDTLLLRWTDIGEFMEKTQEGAEAFLKKTYEMGKTGLIVEGGGMKCAYSAGILDRFLDDKITFDYCIGVSAGAANTLSYLAGQRGRNLRFYTVHLDDPRYLSVRSLLRTGNLFGLEYIYGTLTNSDGADPIDYDAIMKNPAEFYMPATDALTGKAAYFSKFDIVRDDYRTIMATCALPAFCRPVNVNGHFYYDGGVADSIPVHHALEHGCDKVVIILSNPRDFVKQPEAHRPIYKRMLRRYPKTIEGIDHRHINYQASIDLSNRLEKEGRALIFAPSRHLPLGTFSRDAALEQKLYDLGVSDYEAKRAALQEFLKAQGHSMHPDEKIRNIHERVKYLKRDRKLEAGYMTMEEYIREEAERRAKLIAPSIAESMAESMAESMAESMAESMAETLAESMAESMAETLAKPMAESMAETLAKPMAESLAASKVAQSILSLAAELGTIPAEEQQRIAGEQDDETLEKWLKLAARSTTVEEFLSGMMSFAHLHVHTEYSLLDGSNKIKEYVKRIKELGMTAGAITDHGVMFGVIDFYKEAKKAGINPVLGCEVYVAPNSRFDREMSHGEDRYYHLVLLAENNQGYQNLMKIVSKGFVEGYYYKPRVDMELLEQYHEGLIALSACLAGEVQRYLVRGLYDEAKKTAQRYEACFGKGNYFLELQDHGIPDQKTVNAGLMRLSQELGIELVATNDVHYTYAEDWEAHDILLCLQTGKKLSDENRMRYEGGQYYVKSEEEMRALFPYAAQAIENTQKIADRCHVEIEFGVTKLPHFTVPDGYDSWTYLNKLCHEGLIQRYPDRHDELLPQLDYELSVIQKMGYVDYFLIVWDFINYARTHGIPVGPGRGSAAGSLVSYTTGITNIDPIRYNLLFERFLNPERVTMPDIDIDFCYERRSEVIDYVIGKYGKDCVTQIVTFGTLAARGVIRDVGRVMDLPYNFCDTIAKNIPNELNITIDKALTMNPELRTMYETDDTVHTLIDMAKRLEGLPRHTSMHAAGVVISQKAMDEYVPLSRASDGTITTQFVMTTIEELGLLKMDFLGLRTLTVIKDAVALVEKNHGVRIDVDHIDYNDNSDPDAIQIDYGDKKVLDAIGTGKCEGVFQLESAGMKNFMKELKPQSLEDVIAGISLYRPGPMDFIPKYIKGKNEPESITYTCKELEPILEPTYGCIVYQEQVMQIVQNLAGYSMGQADNIRRAMSKKKQYVIDAERHNFVYGNEEQGIKGCIANGISEKAANEIYDSMVDFAKYAFNKSHAAAYAVVAYQTAYLKYYYPVEFMAALMTSVIDNPRKVAEYIYTCRQMGIKVLAPDINEGEGRFSATKDGIRYGLYAIKSIGRSVVDAIIAERNQNGPYRTLQNFIERVADSEVNKRTVENLIKSGACDTLDGNRQQMMMVYNALMDQQVQTKKKSLAGQMSLFDLVSEEEKKAYEIQYPNVGEYSKEIKLGFEKEVIGIYLTGHPLEEYEEKWRRIISAVTSDFLLDEESGEVKLRDNQKVIIGGMITEKTIKYTKNNKTMAFLTLEDLFGTVEVIVFPGEYERYHTLLNEDEKVFIRGHANVEEDKNAKIVCEQICTFEQAENGMPQEQRTYRQGGGYRRGAGGNAGSSPASAGDGGSSRGGAAAQVPARRGDELWLQFETKEAFAEKEKELYAMLHDSDGKDTVVIYISSVKAMKRLPENYSICIEPEIVNNLTKFLGENNVKVVKKSIEKKPMAKEINTIGVLTSGGDAPGMNAAIRAVVREAIAKGKKVKGIKRGYAGLLQEEIVDMEAKDVSDIIQRGGTILQTARCMEFKTPEGQQKAAEICKKHGIDGIIVIGGDGSFRGAQKLAALGINTIGLPGTIDLDIACTEYTIGFDTAVNTAMEAIDKVRDTSTSHERCSIIEVMGRGAGYIALWCGIANGAEDILLPEKYDYDEQKIVNHIIENRKRGKQHHIIVNAEGIGHSASMAKRIEAATGVETRATILGHMQRGGSPTCKDRVYASTMGALAVDLLCEGKSNRVVGYRHGDFVDDDIDEALAMQKSIPEYQYQISKNLSMMITSSSNQQMKNITALMKKAKERKSQNLFVVEGRKMFEEVPPEWLSKVYVSERFLEEPEAEQLLAGKTYEVVADAVFKSISDTQTPQGILCLVRMPQYPLSDLLRGNRTHLLIVESIQDPGNLGTMLRTGEGAGITGIIMNRTTVDLFNPKTIRSTMGSIYRVPYYIADDLAETIGELKRQKVGIYAAHLKGQMQYDEPSYCKGTAFLIGNEGNGLSDEIAGLADTYVRIPMEGSVESLNAAVSAALLMYETNRQRRRNGKMRIWFKMMKNNHLLRDTTITDESDETRTHKVFHALEEVCYEFDLGKPIWLEANVNEFKRHAKTRFTQDSFIEQIDFDFLEMQVIEEDMDKPVALGEVTLGEGVDSWNTIIFLYNSALKEVRTKVEILNDEFQQVHQYNPIEYIKSRIKAPESIVKKLKRYGYDSSIDNMVNYINDIAGIRIVCSFTSDIYRLAEMIGKQNDLTVISVKDYIRHPKESGYKSYHMLVTVPIFLSDRIIDTKVEIQIRTMAMDFWASLEHKIYYKFEGNAPDYISRDLRECSGIVSMLDAKMLQLNEAILEAKAAQEEQEGDTGAVMQYNYDFEIASLLIMTIILLHFVFVRQFPGEKTRVFGWLLFVCEAECLMNILSCVGLANAALVPQRLNEVLAFAFFVLEGASSYLIYRYFMAACALRGRERTVFAAAGMIPFAVFLVLVAVTPVTGFFYYFRDGSYYQGVGADYGYAYIVIFFLLGLLIVVRQHKYTTLRTKVIVCAYTAVAAAMIGLQYWHREMLCTSVSNTVVLIMLYLQIQNPVVFLDTTTGIGNGTAFESQLEDRLRRKGEGYVLTIHLSKFYHIHTILGTENSNELLREIGAYLYNLCGKFHVFHTAGDAFTVFADTKEQCERLKCEIQKRFESDWVVQENRIALDMEMVVQHYPTDFKAMAEYYGMREFLLENAGKSGAQVIVDADADMIAQYRRRRKVEIAVARAIREKGFLVYYQPVYSLKERQIVSLEALVRLKDPELGFISPEEFIPLAERDGNIIHIGEQVLEQCCRFLSKHVLSNGSLGIRTIHVNISMVQCLRQNLTETIRPVLESYHIPPSMLTLEVTEHTAIGAPERMLWHMHELGKMGVSFALDDYGSGNANCSYLIRFPFQEIKIDKEIVWASFRDKAARIVLENEIHTIKQLGIPLIIEGIEEREQSEAMEQLGVECIQGYYYGRPLPEQECLRYIRTFQEKAQNDRQQAAVSGETQKEAGRMNIINAENLTKSYTERKLLDKASFYLQEGEKVGVIGINGTGKSTLLKIIAGLEEPDEGQVTCANHIVVRYLPQNPVFDPEMTVLDSVLTQCVLNFVGSGRTERTDADAHAQEQKWSLESDAKSMMTRLGITDFTQKTGELSGGQRKRLALVAALLVPCDVLILDEPTNHLDSAMADWLENYLKKWRGALVMITHDRYFLDSVCNRIVEVDKGAIYSYETNYSGYLERKAEREESAEASERKRQSVLRKELEWVRRGAKARTTKQKGRLQRYEELKNQKAPERDSQVEMSSVYSRMGKTTIELDHITKGYDGRTLLRDFSYIFLKGDRIGFIGANGSGKTTLMKMIAGRIKPDAGTITVGATIKIGYYTQEIETGREAGIAYMDPEEKVIDYIRNTAEYVRTTDGLVSASNMLERFLFPAAQQYSPIGKLSGGERRRLNLLRVLMEAPNVLILDEPTNDLDTQTLAILEDYLDSYEGIVIVVSHDRYFLDRVVRRIFAFEGNGEIRQYEGGYTDYVNRLAEEGRKPGETAEVQGMTARGVSEAESAQEAGGVTGTSGQDAAEQADSRNTWKREKKLKFSYKEQREYETIEDDIANLEAKVEQLDADMAENATNPVKLGELLAEKEAAEQALEEKMERWEYLEELAAKIAGQEMIIQFIVSLFATLSFAELFGAPKKELFFCGLTGAIGWVVYVIGLNSDMGTVLANLTATFALTVFSRILSAIRRNPVTIYLIAGIFPLVPGAGIYYTSYYFIMNDMTQFSNYGMETIKVAGAIVLGIVFGFGLPQSWFNALQRIERKKTALMAVTKEILALAVEIGDALLRNGAEVYRVEDTVMHILEAYEIENYDVYVLSNGIFASANEDREDACSMIRHIPLGTTHLGRIAALNQLSREICSHECSLIDAWNRLERCKNISFGKPVVHIFFCGLGCGCFSYLFGGTALDSIVGFFIGMLLQVFLFALKRHKNSKFITNILGSAFVTLLSLIVLSFGTPILYDKVIIGDIMPLVPGIALTTSIRDFFNGDYLSGAIHMIDAILTAFCIAVGVGTVITIYHFARGGAALLMNCRKYRACLVGVLTIALICGALLYLKYGREGETPVDGVLVERNSTWEAGTAAMSAKSETLYLKIDQNTIVTDRHVTLGDIAKMECPDASIVRQLKQKKIYTFAEAMNPRKQKNQMKVFSILKIVELIHEEYPNVDISNEGEKDFIIEYIPNPEKPKWINALKTVALCVVIFFGAAFTIMAFNNDVSVGDVFSKFYRQVMGKESSGVTELEICYSIGLAIGITLFFNHVGSKKITPDPTPMQVEMRKYEKDIDTTFIENAERKGHSIDVNMLIEHIFLGFCGLAAGLAVSAGTFAFLIVIGVIPRMIGKCNRAAETLHFENAVILGGICGNLASVFLQIRIPFGPALLCVYGISAGIFVGSIVVALAEILNTFPITFRRMGLKVGLFWVMLAMAAGKVAGSLYYFLGNFKAQMVPSIARQSVIIKCNMQKSILTGNYEFYYAAGLIANLSGVEIPEDIKPEELLALLSEKIPTLTPADEKEKYLFGMVADYRPEDVYDEQMRELLDWGRTEKYLWTVTLPDDWQNAMDKEKERLQKKYNDYVKQVTPTHNLWWNMAKAFVTGGIICCIGQFILNVCVNYGLDQKTSGSWCSMLLILLSVLLTGLNLYPSIANWGGAGALVPITGFANGVAAPAIEFQKEGQVFGIGCKIFTIAGPVILYGIFSSWVLGLIYWVLKWWGMVMPFPCGSGRGKTFSQTRNIVIFGSERGKTPFQTREVDEKKEKEEKKEATRVWKRKNILPDPKYCDFRVMTPLHTQILTARDRNGQELRTIQNQLQKLPPGKLICSRNGTTVKWYQGDGHSKTYIPKANRALAEQLALKKYLQQQEQILLQEQAAITAYLKYSPAGSLSSDDPHLLSDPACENLLHSYFSTSKNIPDVSNVSDISDISTRSAVEWSAASYERNPLHPEQLLHKTVSGERVRSKSEAMIAMLLHLNAIPYRYECALSLGGITLFPDFTIRHPGTGALYYWEHFGLMDDPAYAKNAGSKLSLYAANGIIPSVHLITTYETKAYPLNAGMIEHLISYYFLDSAVMQVEKERWHIMRKDYEFGIAGVIWVKSVCNRMNKFMEEHRVKWLMSVTKQFVRYVTQNIFGMLGISCYIIADTFFIAKAAGTDGITVLNLVLPIYNLIFAIGSMIGVGSATRFTILRAQGEERAHGYFSNAICFVWMIGILFTLAGVFIPDKIIALMGGDAGIVALGTGYTRIFLLFTPFFMMNYVIMAFVRNDNQPSLAMAGTLAGSFSNILFDYIFMFPLGMGLEGAALATAASPIISILICSAHFFGKKNTVRFRLHAPSIAQLFGACQLGVPAFVGEISSGVITTVFNFLILGLVGNIGVAAYGVIANFALVAMAIFNGVSQGAQPIVSDCYGKGDVKSVRKIRNLGLVTALGIAVVLVGAVYGFTDSLVSLFNSEHSAELAEYAHTGMRLYFIGFLFAGINIVGAGFLSATERARESFVTSIMRGFVCIIGCSLLFAAVFGINGVWLSFPASELLTAIVMAVVLVRDNRRLMKKIAFFDIDGTLTSEIDGSIPESAVYAIRAARANGNLMFINTGRCFQNVEQRFRDVGFDGFVCGCGTDIYCDGAEILHVAQTHETVMKLLLAAREWDIDILFESRKEVAFDLARPLRHPDARRQYEAFEERGYEMPEHLENPNFFCDKFVLWFEHPEQLAGFRTTSDRYFECIDRGGNFREFVPLGYSKATGLNYVLDYYRIDKKDAYAFGDSNNDLPMLTALTNSVAMGNASPATLFDKVSYVTKCASEDGIRLALEHFGFIMKMTWVHKLLGKHSKKFYGILAGILTAAVAGSGVGYHVIAASGTADQTEEDTQIDETDEDGSFSGTGTTQVKTESQLPDFSVNAVTMTVEEVYVEAGSTVAEGDALFKIDDESMADAKAYYEDAISDAKTALQSAQINFESGVLEAESELSSTKLAADTAQDTYDAAVSELSVKTSEAQEAYDEAVEEISDYQDAIDNGTYYTQVGINEKQAAVDTAQATLTEKQTQLSNAQSSSQAAKETYAADMANLKTQIEAGASYTDLAALADQLAADYTAVQEAADALSQSQTEAESANSALQLANQTFQKAVEEYNTKVTEANEKIAELTDELEKLSDACDEAERNETTAQPALLQQYEEAVLEGKYADTEYEASLETLQSAVDEAQDTLDELKEQQSALLAIEDGVVCADRDGTLASVTYEAGDTLIKNTAFASYYDLDTILISVEVSQNDIAKLAVGDTVQVQISGSRMGAIDGTVYSIASEKTSGGSMSNVTYAVIVAVDNTDGTLTTGVQATVKFETQATGATEMEETKTAGKTETIGASETEEAGGKTEMKKKKLWLVTGVAAAAVLAAGTVTFAYQSGSDSEEQTVYKEVTVEKGNLTAGVTESGSVTIGTLDQTLDFSEDSSSASTQNNSSAQNSAGGNATSSTSTASTLEVEMVYVTAGQSVEEGDPILKLTEESVASYKKDLEEAVTEAKTAVSEAGLSAEKQKVSASYSYNLSTAEGSVAQETYEAAIKQLQEAVDDAQEAVDTSASLINYYQEQIDAGVDLSASLTEEQENYDKLYTKLVAAKNNYTTKSIEAEKTLKEAELSAKNASSQYSVDVSGADNDITDAKDTLSDAEEALEEFETAIGDDGTIYAEYTGTITDLEYEEGDTISSGATVATFSNTDAVTITVSVSEEDITNIAVGDVVEIELSAYEDQTFAGEVESIDTSSSSGSSTVSYNVTAAFTGDITGIYTDMTGNVTFISRQVTDVLYVSNKAVQSDGTTSYVKVKDADGTIRMVDVETGFSDGVNVEITSGLTEGETVLIESQVTEMKPKELLRLVWINITQNKFKVIMTSIGIIVGAATIVMVIAIGKGGQADVADQFKNLNAGAVDISYDGGTDFGGGGSSDDSDSDMAMMAPGGGGGFGGGFGGAPSGDMGGGSLSGGEAPGGSPGGEMPSGDGGGMPDMGSFFGGQSDMEDRMNQENITLSEDDVDDIETFASGISAATISYTTKSSVDGGDLDEADTYTIAGVKSNYETISNLSLAVGSFITDDDDENKEKVCVLGASVAEEIFGSAIEAYGSVIYIDDRLYVVNGVLESMGTVASGISPDDSIFIPYATGVKYLVGSSVSPTITVLAADVNNVEGVIEEVTEVLATSYPNAEFTFEDAGSKMEAAEASNQILTMLLIAMAAIVFVVGGIGIMNVLFVSVKERTNEIGILKAIGCSKRDILLEFLAEAAAISLIGGVLGNLASLAVAPIVQYLGVRVELSALAFLIALVFAVGTGTIFGFYPAYKASNLVPVEALGAEMIKKKAVAGGIVALAAVLGGGGIFAWTRRTADTETLADNQKYVYAYVTSIEGNELTYMEVDESVVEAYLASSTEDTENTEKGGDGSGAPGGSDGSGAPGGSDTAGAPGDSTEASGDGTGAPGDGSGAPGDSTEASGDGSGAPGRMSQGTSGTDANTETSDGQPQEENGDMPGDATSDGTGSNGGGAPGGNGGMSGKSVTTLIPVSTVVHTTAGTETTFQRLAAGDLLKLLIETSEDGEEVIIEIWMQMDAVMDMEPAICAVTKAESIENTDVITMRNINKSYRMGTQSLHVLKDVSLTVKQGEYLAILGPSGSGKSTLMNIIGCMDVMDSGNYLLDGVAIEQAKEKELVKIRNQKIGFIFQKYHLIPTYNVLQNIVMPLLMRGMGLAEAQETSMDTIDMLGLSQRIGHKPNELSGGQQQRVAIARALVGKPAILLADEPTGALDVNSGKEVLKLFENLNQMGNTIVMITHDLNVAKHAGRVVRIVDGEIYENMLIAAIPCKRVRMEHIRPLHVSMRIRLCFMLTFVSANIMLQTVDSGLCTQKRALRPAKMTNEQIRDFLEKHAEKQFKDFTSSLIPGTDSILGVRLPVLRSLAKQLAKEDWRTYLKEARDDTYEEIMLQGLVIGYVKAEMEELLEYAAAFIPKIHDWSVNDGFCSTFKIVRKHRAEVWDFLMQYRASESEFEQRVVAVMLMDHFLVPEYIGRVLAVYNSLKHEGYYCKMGVAWGIATAYAKFPQETQAFLLENELDDYTYNKAIQKMLESYRVSAEDKEMLRGMKRKVTGRKNVAKPEQMGTAYQNTMRKSLMKMCRIETERIATPVVHMLYLTYAETTPDLGYDSNGGQRLMARFTLPRDLYHGKGALEALKDFEGKRAMICVGGGSMKRFGFLDRAKQYLEEAGMEVCLFEGIEPDPSVETVMKGAKAMEEFKPDWIVAMGGGSPIDAAKAMWIKYEYPDITFEDMCKVFGIPKLRKKAHFCAISSTSGTATEVTAFSIITDYEKGIKYPIADFEITPDVAIVDPELAETMPQKLVAHTGMDAMTHAIEAYVSTANCDFTDPLALHAIKMIQRDLVGSYNGDMEKRDSMHNAQCLAGMAFSNALLGIVHSMAHKTGAAFADYGAHIIHGAANAMYLPKVIAFNAKDETAKKRYGEIADFMGLGGDTLDEKVALLITYLRGMNDDLKIPHCIKNYGADSYPTEQGFVPEEVFLERLPEIAANAILDACTGSNPRQPSQEEMEKLLKCCYYDTEVDFMYYTGKISFSFPSVHKFSDCSSTFSVGNMVRYFGKFPAAQKLGRLGVKLVMEIQVGKQSLAFAEAPYIISSASIVGKKEGEGPLGNRFDVVGEDDKFGQNTWEEAESTLQKEAFTLAVGKAGLKTEDIRYLFSGDLLGQNIATSFGLMDYQVPLLGLYGACSTCGEALSLGAMCVAAGYADYVVAMTSSHFASAEKQFRFPLEYANQRPKSATWTVTGSGAYVLGKKRSKARITGITTGKIVDYGIKDSMNMGAAMAPAASDVICRHLSDFGRNVTDYDKIITGDLGKVGQEILWDLTRTGGYDISSIHTDCGIEIYDADKQGTGAGGSGCGCAAVTLSAHFMRQIEEGKWKRILFVPTGALLSTVSFNEGMTVPGIAHAVVIEHAGMDYVNAFWVGGLICALVQILMEKTKMLPGRIMVLLVCLGTLLGAIQIYEPFVEFAGAGASVPLLGFGNVLWKGVKEAVDQYGFLGIFMGGFQASAVGISAALVFGYLASLIFQPKMKKMDENALRAAGIDYDAALARFMGKQAIYEKYLQKLPEDAHMDAAWAALEQQDEAELLEQVHAIKGLTGTLGITGLFEQSAAIVALLRAGTREGLQEKMTSLKQEWDRVCETIRQAMNGTRHTGTSVAVYKDLKEQILHLELPPGSAISEIDTAAAFHVSRTPVRDAFKMLEREGLLEVRPHIGTFVSLIDLNMISDILYLRETLEQAVLRDLTAGYDKSQEFRIRLLLQRQCELLEQDLPAEELGRAFIINDNEFHTTLYELAGKRTVMDFLTGVSSQYERFRTFLNLGDRDNLLRLYNDHIKIWSCISSRDYEGLSDVVSHHIYDGFNASTEIISRHPDYFCPFHMKLSFRWYGPDDKVTLENIRQIPGMHSIVTAVYDVPVGEVWSEESIAALKKQVEDAGLHFEVIESIPVHEDIKLGKPSRDRYIENYCENIRRVAKAGVKCICYNFMPVFDWTRTQLDHVLPDGSTSLVYYQEQVDAVNPLQSDSDLTLPGWDASYTREELKQVVAEYNAMSEDDLWNNLKYFLERVIPVAAECDVNMAIHEDDPCWSIFGLPRIITCEKNIDRFLGLVDDPHNGITLCTGSLGCSNKNDVVKMAAKYAAMGRIHFAHLRNVAVLENGFEERAHLSSCGSLDMYAIVKALHDNGFTGYVRPDHGRMIWGETGRPGYGLYDRALGATYINGLFEAVEKASKEKMKLPFQIDLTGKVVVVTGAGGVICSVLAEAMAMTGAKVALLDLNEDAAKKHADDITAKGYIAKGYKCNVLEKASVQAARDQIAADFGTCDILINGAGGNNPKATTDDEYFVPEDLGQMKTFFDLDADGVSFVFSLNFMGTLIPTQVFALDMVNKKGASIINISSMNAYTPLTKIPAYSGAKAAISNFTEWLAVHFSKVGIRCNAIAPGFFSTQQNAKLLFNEDGTPTARTGKILNNTPMDRFGEVEELIGSVLFLACEEASGFVNGACIPIDGAFAAYSGVMGYFDFQKKSDCIVCIDSDGCAMDTMEVKHRTCFGPQWIKTFGLTEHEAECMELWLSINLYSITRGINRFKGLALALAEVEKRGLGNIEGLAEYEAWTKEAKELSNPALLAVTQKSDNPCFEKALLWSIRTNRAIHALPAEDRPFPNVKSAMDAMAKQADLAAVSSANREAVEAEWGRHHLAEDCSTLLTQEAGTKAFCIGELRKMGYEPGRILMVGDAPGDRDAAEKNGVRFYPILVGHEGESWKRLLEEAFPKLLAGSFDAEYQKELNQAFERNLGVHADSEMVDMKAKPFYLSDEDCKWVEETIAGMTTEEKIGQLFFNMGSSRDEEYLKMTVDKYHIGGIRYNPATGAEVREQNRILQENSKIPLIIACNTENGGNGACTDGTMIGQQTKIGATRDARYAYELGRMSNKEAAAIGCNLSFAPVSDILYNWENPVIGLRTYGNDVDRVCEMTKAYMDGAHTNEGFCCAAKHFPGDGLDFRDQHVADSVNDMSCEEWDASYGKVYQNLIDNGLEAIMAGHIMQPAYTRHFNPGIKDEDIMPATLSPELIEGLLRGKLGFNGMVLTDASHMVGLTCCMKRSEMLPHTIAAGVDMFLFFNEMDEDFASMMAGYENGIITEERLNDALHRILALKAHMGLHKKAKNEIVPPVEVMEQVVGCEEHKAMAREISEKGITLVKYKDEDVLPMIPSRYKRIMIVSVSGLSAGVMGTMMAKYMGGGKKSPAERLRDKLIEKGFDAFIYESPLDALAKRAAAGEKVDINMYFAGKTPIKDFVENQDLIITLVDIAGGFQPVARPGFGMSKGGGEIPWYVHELPVIVIGCGQPFVLADIPQARTYINTYDSADQTFDALIEKLMSGSDAFIGEDPVDAYCGLWDTHRMMADEKIKNSSELEFVVFCIENVAAKLGMDAERVYQAFAEKSDILSGYIVPEYEVLHTQSREYIVDDLIDVMKERGVEVMILYHGSFGKDATDYDLVVGGVANDKVFNTVELFFDGWIDKAEAIKRLRYEKPNVQICFRTERALSLLHFEGSEIVMYDSKSDFTSKKYSRVIACFAKRQGISLDVALEFFYHSEVYQLIRDGVSDMHCMSDAYLAEELEQEYAGKMPDAKGGIFMKYFVTDRERDGTCYHEFYKGRWDGKTFWKEDSISLHDNIMFQAKEFIAALVVCVPKYDPFGETEITADEWIKIGTLISSKDNISKEVYEEANKWAKEVFKSYGCFTILGLMTDQNCAYCMEGDLVAAFGIKICELPSSKVYLFKEQSHRGRVIVAHKKHVSEITELTAEERAAYIEDINHVAEALHQAFHPQKVNYGAYGDTGHHLHFHLVPKYTDEYEWGGVFAMNPQQKFLSDEEYTALIEEIKKYLMNKVLEEFSKIGIIPVIALDHVEDAAPLAKALCDGGLPCAEVTFRTAAAEESIRIMSEQFPEMLVGAGTVLTTEQVDRAVNAGAKFIVSPGLNPKVVKYCVDKGIPVTPGCSNPSDVEVAIELGLEVVKFFPAEAAGGLNMIKSMAAPYTKMKFMPTGGINAKNLTNYLDFKKIIACGGSWMVNKDMIAAKDWAGITALTKEAVATMLGFKLLHVGVNNASEEVASTESAKFATLLGQDVKVGNSSMFVGSLIEMMKNPGRGTHGHICIQTNYLDRAIYHLEKRGFAFDESSFKYNDKGELTVAYLKDEIAGFAVHFNQKMFHVMVQNYYNMWKNLVNRFKKQNRVFSIKQNAGTAEIPELTFGQRSWYDNKAVPQYGTTDMAEEREAKNPVQSAERIFQVMETLADHGEMGLMELSTALDLHKSTVHRLLMSLIYMGYAKQDEATQKYMLSYKVVNMAGKILERMDILQVAKPYMERLSDLSGEAVHLVQREGNHILYIYKIEAKVGTIRMVSHVGMVHPMYCSGVGKAIMATLPDEEVKKIWNESIIEKKTDKTITDFSQMQEVLDEVRQNGYALDDEENEKGVRCIAACLHGYQKEVKYAFSISGPTSRMTRERVRELAVDVKKVQEELSRELGYYKSMRKWRTLLAGLVLTFAVSAMAACGTNNDKVNDTTNGTGTESTVDGTGTNGTTNGTTNGTNGTTNGTNGTTNGTVNDTNGTLNDNGAMDNNGAADNNGNGNVVDDVVDGVGEAGKDVINGVENGVDDLTGNDNNNNGTTDNNGNGRMNHNDFREIIDDAPETGADTNTGTAGSRQPGSADNGVPAGNAAHGAQTGSEAPRAEDVAEHESTSGTGEVTQSSASDDTDRNQDTEYEDICYICRRPEHIAGKMIRIPNNICICQDCMQKTFDSMNGSGFSMDDMMNMNMGRIPNISMINLSDLQGGLPNNQKLKKKKPKAQSEPVIDIKKIPAPHKIKASLDEYVVGQEQAKKVMSVAVYNHYKRIAADEKDGVEIEKSNMLMIGPTGCGKTYLVKTLARLLDVPLAITDATSLTEAGYIGDDIESVVSKLLAAADNDVERAEHGIIFIDEIDKIAKKRNTNQRDVSGESVQQGMLKLLEGAEVEVPVGASSKNAMVPMTMVNTKNILFICGGAFPELEEIIKERLNQEASIGFRAKLKDEYDKDENLLSKVTVEDVRKFGMIPEFLGRLPILFTLEPLSEDTLVRILQEPKNAILKQYEKLLAMDEVKLAFDEDALRAIAHKAKEKKVGARALRAVIEEFMLDIMYEIPKDDNIGMVTITKDYVEKKGSPVITLRGCIGIGSTENPQIAASNMPNCMEQVYSEEYYDFLIPYGVEAEVPSTPGCVQRIAEDYDIFFYPREGLPPLSIGNYTYTAIPKCYALLDTTALDASGITRLQNQPVLALKGEGVLVGVIDTGVDYTNPLFRYSDGSSRILRIWDQTVQDGTPPEGILYGAEYRKEEIDEALQAERPYDVVPSRDENGHGTFVTGVVCGGEDIPNGFIGAVPNAGIAVVKLKEAKRYLREFFFVPEGVPAYQETDLMMAVSYLNGVANVLNMPLVICLALGNSMGGHGTDGPLPNFLNYISTRRRRSIVTATGNEANTRHHFQGALRREMDYEDVEISVEQDMAGFFIELWAGAPELYAISVISPTGERIPKVSLRSGASKSFRFVFEGTTVSVDYRIETKETANQLIYLRFSDVRRGLWIVRVYPENIVSGNYNMWLPMQKLTDGNVIFLRSNPDTTLTAPGTAAQVITVGGYQVSNNSMYADSGRGYTVAGEIKPDFVAPAVNVYGPGLRGNYVTYTGTSAAAAVTAGAVAQIMQWALVQQNDPVMSNAAIKNMLIRGAKRSEDRGYPNREWGYGALDVYQAFEYLRLMERVTAGVLAAVMALGMTGCANSGMSGTTTDLTGQYGTKEEGQTEGTGANGQTGQAEDTGTEDTAMEEKDLGAIREAFEYSYTQFSLNLLRESRKQVQNGEDAKNTMVCPLSVMMALEMARTGADGDTKQQMGAVLYPGMSAEDGSMVLGRICKSLPDAEGARFHMSDSVWVKTADDVFVPDENFLDTVKTAYDAEVFGAPFDETTCRDINRLVEQETDGMITEILDQIPELAVMYLVNAVAFDAEWETPYDESQIQDATFYAEDGSGQEVSMMYDTTYRYLTMEHAEGFCRAYKEGYDFVALLPEEGLSLSEWLEELDGETFHETIRQENDTMIETGLPQFTGETDLELKDTLTALGMPLAFDEEQADFSKMGYCPDGRNISISRVLHKTHIDVDGLGTKAGAATVVEMCKEMAMVEQPERIILDRPFLYAIVEKDTGIPVFIGTVESFMEDEKIIALYWDRDQTAIAETQQKYGRYCGSIAHNIVHDAQDAEECVNDTWMRAWNSMPRERPHLLAAFLGAITRNLSLDCYRRKHSEKRGGGVMPDIYEELHDCAGGEEPLTQIERKELAASINRFLEGLDRESRIIFMRRYWYMDGIGAIAGRLAVSESKVKSSLYRSRGKLRRHLEREGLLSMKTDDLLDALGEADPAYIQEAEDVRYLGARRKHFMQMAACVALLLIGGSYGIWQQYESTARTDMAKTESAETAEAYDTAASDGIMTSDAATPDGTAESAKEYEAAAQSAAEDGDGIQEAAQPESAAGIDWYFNEVEELQTSIACGAEAAKTVSLTEEQLQNYYGIKVIPDAIPDGYVQTDEEKTYQIGYDADGNVIDDNCVMRYENSETAGWFTIRARSTDMGEMTSYVSGGLKPMTVSGVKVTAAHYPAGSSGGTFTDGYLATYKKNGVTVNVQSEGLSRDEFCALVENLLAEMKITTKQITTTAVLLAICIVSQFFKNTSVYITGPVINACLILAVLSVGIPCGIILSVITPVTSFFITGSPIIGAIPAIMPCIMAGNALLVLGVGLVTKKCKGNGGLIAGMAAGSVVKALFMGIVISLILIPNLLPAPMEAKMAVFQTTFSVTQLVTSLIGSVYAFILWIPLKKVVKMDIRFVKRDVLKEKPDQKHLGFGKYMTDYMFVMDWTKEDGWKDARIVPEGPISLEPACVTLHYAQETFEGMKAYRTAEGKIQLFRPEMNAKRMINSNARLCMPEFPVDMFVEAVKALVKVEADWVPSEPETSLYIRPFMFATEAALGVHMASAYKFMIICCPVGAYYAEGINPVKILVEDELVRAVKGGTGFTKCGGNYAGSILGQVKAEKLGYSQVLWLDGEHRKYVEEVGTMNIMFKIAGEIYTAPIEGTVLPGVTRDSMIHLLRDWGYKVNETRLSVDDLMKAGHDGTLEEVFGTGTAAVISPVGELRYKDDVVTINDFKIGELTQKLYDTLTGIQWGKLPDKYGWTVPVEMERMKKKKKEIRLRTFFVRFLLKLVAAVLLAFLLWLLQITVSVGTGLILPANAAEKEALAYLHTIGAHTDIVSSGIPSACGYAIYDASGELLETDMSGSIRENADLLALSGQDSLSANMLGRTYVKRQTDTRIVVLTYDFRSAFANPTLRRLFPSAELLEVFLLLFLLLAAFVLVITRQAKYLSRELFHLQEAADEIRNQNLDFTIRPTAICEFNQVAASLDALKSELSASLKEQWHMQQQRRRQFSALAHDIKTPLTIVRGNAELLSETALDETQQSCNRFILENAAQIQDYLSRIIELAKTDDPAACSAECRFQAQLHTASFFDDLLGNTKSLGQKKELHVLFSTETLPAVLPLPEHPLRRILNNLLDNAVCYSPHKGTVTLDASIRDYRDAPEKESTLFLTVSDEGPGFCEDALLYGTEAFYRESADRNDKSHFGLGLSIADQLARGLGGSIALCNAPAGGAVVIVRLPLTGQIQRDAEMAHILAIDDDPGILALIEHALRREGHTITCMPHVPADLAAHLAEYDLILLDVMMPQTDGYELCSAIRDDTDCPILFLTAKTMEEDVDYGFSVGADDYIKKPFSIVELRARVAAHLRREQREKHHCLSIQGIRFLLASREVAAGGVTLPFTRTEYEITLLLAKNRGQTFSREQIYEAVLGYDKTGDASAITEHIKNIRKKFAAVNMAPIQTVWGIGYRWNAMNQTTITKQRGLSDFALKYFAMVCMILDHIHYFFSFTGKIPLFFSWIGRLAAPLFLFCIVEGFLHTHDRKKYFLRIYAIAIFMGLVQFSFYNIASGLVRPDGFFPQNQMLASFSVLLVVLWGIDRCQKKQWIRGLSAILIPVFLPFLLYGLFAVSAAFGIPYGNFLLNLLVYSVLPCHTAIIDGGTATLLGGVILYLTHRHRRLQAGAFALFVLAWDILPVLLFMPAGTSTSFFFTDAYEWLEVFAVIPMLCYNGTRGHGSKKLFYWFYPTHIYVLYALSFLLYLTLYGMGSMTKQEKAIELHDRGCNCAQAVACAFAEEIGVPEETLFAAAEGFGLGMGGMEATCGAVSGAVMLAGFKNSCADPKNPKTKAATYQLTREITRQFAEKNHALVCKELKGVETGVVLRSCPDCIRDAVAIAEKVLQMKKKVISLILAATMVATMATGCGNSSGETTTTDNAASTTTDAAAPATEASDTAAAATEAAGGDYADKKVGVCIYQFSDNFMTLFRTELENYLVEQGFSKDNITIVDGANDQATQTGQIDNFISEGVDVLIVNPVNSSSAATITDKVVAADIPLVYINREPDAEEEQRWEDNGWNVTYVGCDARQSGTFQGEMIVDLGLDTVDLNGDGKIQYVMVEGDPENVDAQYRTEYSVKALTDAGLEVECLSDQVGNWQQDQAQQIVANALGQYGDKVEVVFCNNDAMALGALQAIQSAGRTVGTDIFLVGVDALSEALEDVVAGTMTGTVFNDHFSQSHGAADAAINFINGETNEYYIGCDYVKVTKDNAQEILDMVKMAEYKLELKGICKSFPGVKALDNVQLSLRPGTVHALMGENGAGKSTLMKCLFGIYKMDAGEVYLDGQKIEVNNPDEAMKYGIAMVHQELQPVPARSVAENLYLGRFPTKNYGPLKVIDHKKMYAETEKWLKEVRMDFDPKAQLGTLSIGQMQSVEIAKAVSQQAKVVIFDEPTSSLSDNEVEALFRIMNDLRDKGVAMVYISHKMDEIKRIADDITIMRDGTYVGTWPAAELTTDQIIAKMVGRELTNVYPAKENTPGEVIMEVKNLCSIHANSFQNVSFTLRKGEILGFGGLVGAQRTELMEGIFGIRGIASGEIYMHGKKLKIKHPIDAMNAGIGLITEDRRGNGIFGCLSIKDNVGVSIYNKYLKAGFVLDHKKMNKVVDDSIKKLSIKTPSMNEHISNLSGGNQQKVIISRWLANDPDVLIMDEPTRGIDVGAKHEIYEIMNELAAQGKAIIMISSEMSELLGMADRICVMCNGKITGEIDQPEEMTQAMVMNFATRFMTKTNQQKVKDFLINNGVIIVMFILVIYTGFTSDNFFTKNNFMNILMNMSSRLVIALGIAGCVITAGCDLSAGRMIGFGACISGMLLQRMDYSGKFFPDMQPLNVFVVALIAMLVCAAFGTVTGFFIAYLNVPPFIATLAMMEIVYGIGLIVTNATPLGGYVEQYTNVSNGKFLGINYLIWIAIIVAAITWFIFNMTRHGKYMYAIGGNPQAAEVAGVPVKATLILIYMKAAAMYGLAGFMLGAKAGGASVQTGYGYEMEAIAACTIGGVSVTGGRGKVSSAIIGVAVFELLKVALQYLGMNANAQYIAIGVVIFIAISLDIRKYIARKMTVDTIIEQAGIPLLLLVICVYYAIRLIVLHDSQAIRGKHKPPVKDEEAYCKAGGKLLLFFGAATFLMAILVFVNVYVAVAEIIICTVILGILWKRMEDQYGGMSASEKERENMSLYSVLLVDDEEEVFQVIMKKLDWEGMGFRIAGYARNGVEALEMAEELSVDVVMTDIKMPYMDGLTLCRKLKEQYQKIKVIIFSGFDEFEYAREAIKIEAEEYILKPINANELREVFERIKNNLDKELDEKRNIDKLREYYLESLPMLQENFLTSLIDGRIPEDSIEEYARNCSLTLKGPYFVVTVLHISTTNPMEGALPIDPFLLAVSVKKLAEEQLAASEYDSKIVTYLGDGIVITQLPTEEAITRFTDCMDKICKMAKRVCKAKITAGIGHVCSGPEELQMSYLGAKNAVSYRVLYGNTRAINIAEIDPQENADLPWEEPFIQKIIKKVKVGEEQPLLDAIAEFTEKLAGSKMSLQRYRILIMELITELSRFGANNQINLEDVFGGNGDVYTRAMQLESTDALREWLCENCLKLQKQVQNERQDTTKSFVSKAIDYVKEHYADTDLGIETICGYLNVSAAYFSTVFKKETGKTFINYLTDYRMEEAVELLLTQNEKTYVIAEKVGYTDPNYFSYVFKKQFGMSPSKYKTSRMEAAQEAMRERVKQWRQKVTSFLEKHIKPQSIQMTIALSFTIVSVISMGILGISLYNRFVNKMEDMTTQSAEQLLNQTAINLESYLRNMRRISDAMYYSVIKDKDLATDSLDEEMNLLYEANKDNLISIACYTNDGRLVAAAPVATEKNNLDIVDQEWFTEATGQMENVHFSTPHVQNLFDDPSYRYYWVVSLSQAVELTSGGNSTLGVLLVDMNYSSIEQLLTKANTDNASEYVYLMDGSGELIYHPKQKLIYTDLFSENNLVAASYEDGSHKEEYDGEKRIVTVKTISYTGWKIVSVVPMSSFDMGISGMRMFVILLMSLSMLMIILLNQFVSANIAKPLKRLNDSVKDWEAGNMNPDIYVGGSLEVEHLGKTLRSTVAQIQELMHDILVEQEEKRKSELDALQSQINPHFLYNTLDSIVWMIEGERYEDAVFMVTQLASLFRISLSRGKTIISMEDELKHARNYMNIQKIRYKNKFTVEFQVEDAILSCCTVKLVIQPLLENAIYYGMESMDGDGEITVVGYRKGDDVYVEVRDNGLGMPDEMVDALLTENNRVRKHGSGVGLINVHNRIRLRFGEPYGLEIESCLDEGTTVRIHLPYIAYSPENTELLEGGRLKQLKGERQDEEKMLILMLVAVIIWAFYNMLNVGKQETSYRVSVVVENSNSDRWTSLRQGLEQAARDYNISLSFVSTGSFSTAMEEMDVVKKQVTNGANGIILQMNTDHAGQELEDLSGQTAVLLLETDVDPEGVYALVAPDNEEMGAALAQAVQSDFGDDLAGKRVGILACSQSQRSMQQRYTGVSQGLRESGAVVEWSLEGKAESIKDAFYTLEQDKPVDILIALGNDETEMMVDFFAGDELGWRLDRCSLYGVGSSEKNVYYLDKGWIQTLVVPNEFNMGYQSMEAIAKQLIYHMDTTRSSKVNYLVVDREHLYDADIQKVLFPIVQMSQRMLRGMAAGLGALVSLGSMAGCGTDGQVQKVTSIKIGVTVYDQYDTFVSQMMTDFNEYAAEQEEQTGIAINVEVYNAAGSQSTQNSQVEEMLDAGCNVICVNLVDRTEPTTIIDMAEKNNVPVIFFNRELVEEDLERWDRVYYVGAKAFESGIMQGEIAADAFKENPDADKNGDGVFQYVVLEGEAGHQDAIVRTEYAVSTIIDNGVEVEKLAYGIANWNRAQAQTKMTQMLAEYDGEIELVIANNDDMALGAIDALKTSHLKRADWPVVVGIDGTDVGLAAVASGEMVGTVYNDKEGQAQAMLDLAYALSVGDTLDDLNLENGKYIRLPYSKVGSRDVKNYMKMLLKNQKEDTTDYTKDWPARYYDIPTGTLRREHLKRAKAEGFAVPADSYREMLCERRFFSEKKDGTVDGFFRAWTMIKASAAAGVSFFQKKRQKKELLTYMKDLCLSPDDLLPESADAVLIEEWQDFARGLISSCTGSKAYCSTLFGFVPIKNAKVAEKLAAEILLVTRDYPALFDLADEFAPFRKVMIETFCQMIENGETYLQAMRFLLSLLYELSIAYPAAKQNPLWTFFTYHSIVNTLNLDNCIRGTLYVQIRNLICTVIHRDSLSAMHLPWQVNEEKGDRKFGGCLSVPFQCETHRQICGMCGIIGYTGSEDVREVLLDALELLEYRGYDSAGIALRDEESGKTEVCKCAGRVSDLRAICASEKVVSQCGIGHTRWATHGGVNDCNAHPHQVGKVTLVHNGIIENYRELIADYDLADTLKSETDSEVVAALLNRFYEGKPEEAIKKTVSKLKGTFALVILFEDQKDVIYSTRNVSPIVATICKEGAMLASDLTALCRFTNRYFVVPEYHILKLSADKLTLTDFDGNEMLPKYLTVDWELNSAGKNGYPFYMEKEIMEQPEAIENTIRNRIVGGMPDFTADGVPDTLFTECEHICIVACGTAMHAGLVAQALVKSILHMHIEVQMASEFMYSDPVIDEKTLVIAVSQSGETIDTLEAVKYAKNRGAKCLAIINVKGSSIARESDYVLYTNAGPEIAVASTKAYTTQLAVFYLIVARMAHSRGVFDDAQTQSFVRELQRTPEVMKKVLERRRDIHVVAKKVLGAKDLFMIGRGLDYSILLEGSLKLKEVSYIHSEAYASGELKHGPIALITQDTPVVATVTQEKLMSKELSNIKEVKSRGADVVVFIKESIVGDLAKEYEIFTLPDMQDEFMVLPASVALQLLAYYVSSDKGFDVDKPRNLAKVVTVEMPDIRYAQNENVDRGDLRMQVIERGTSTPIDDAKISISYSGDPDSTVEEVNTDASGMSETLTLDTPPLELSMQPSEVQPYAEYTIQVTAKGYRPINISGIEVFSGQLSLQEIRMDAEKATESMTDNIVIPAHTLFAEYPPKIAEAEIKPVTETGEIVLSRVVIPEYVIVHDGAPSDPTARDYYVRYRDYIKNVASSEIYSTWPDATIRANVLAIMSFTLNRVYTEWYRNKGYSFTITSSTAYDQKFMYGRNIYQSISDVVDEMFQNYLSRPNVRQPILTQYCDGQRVTCSNWLSQWGSKYLGDQNYETIEILRYYYGNNMFINTAEEVSGIPASWPRVDLSVGSTGEKVRQIQEQLARISRSYPAIPTITPDGIYGPATREAVERFQSIFGLPVTGVIDFRTWYRISEIYVAVTRIAELVMANYRMTIQYDGTRYSGWQSQHATDATIQGKLETVLTRMTGQQVDVIGSGRTDAGVHAIGQVANFHLKQPRDTGELLDGLNRYLPEDIAVSSLTEVDERFHSRYQAVCKTYRYRIHTGEVPDVFARRYVYDYRIPLDVERMREAAGLLLGEHDFKSFCGNTRMKKSTVRTLYEIRVEEHESEIDLFFTGNGFLQNMVRILTGTLIEVGDGRREPGSMTDVLARRDRQAAGYTAPALGLALFSVEYEGDGQNTMEQAMEKWYEIKKGADFQAIAERFGISPVTARLIRNRGVIGDAAIDKYLNGTCRDLYDPHLLYESEKLVCILSEKIRQGRLIRIIGDYDIDGVMSTYILYQGITRCGGSVSCAIPDRMRDGYGINEHLIDAAYEEGMDTIITCDNGIAAINEIAHAKELGMTVLVTDHHEIPYVEEQGVRRYLRSAADAIVNPKQQECSYPYKGLCGATVAWKIIQLLYEKFCIDTEEAFAFLEFVAFATVGDVMELTDENRILVREGLKRLHRTANLGMRALILQNQLTPEQITSYHIGFVLGPCVNASGRLETAKIALNLFLQKNEIDAGKIAKELVELNAQRKSMTADGVELAKQIVDEGTAGEKVLVIYLPGVHESLAGIIAGRIRESYHKPVFVLTDGEEGVKGSGRSTEAYSMYDEMCKCRECFSKFGGHPMAAGLSLCEDVAVFRGKINACCELTEEDFIPKIRIDMAMPAAYPTIGLIRELARLEPFGNGNSKPQFADRELALLRASVVGRNQNVLKLSLMTAAGEHVSAVYFGDVEAWKQYYSEKYGQTEVDAALRGRANAIRMSVIYYPEINVYQGMESVQLIIRNYKMFSGKREKALLEEELAALRETEKRERELLHKIAGQKDTAEEQFARMTASRAQMEKEIEEIEQQMQQNGELSENGAQAAGELHNTLITMNNGIATFDANHSVFMEQVKGQNEKVVEIVENNKHFTTPMKHISEAPQALREMRQALGERAERMEELSKTMGVLALNSAIEAGRMGESGTRFVTAAEQVRAYADDYEQEALALKDQLGEAEERIASLEEQVHHLNELLKENNISMGKLYRDCAQNMAAYETGQIGLRGLIQDTAVARADVLQQSADENVRAREAFLKYVSGMQEELAEQKSSADELENVCKSILQSAGEAGMTKEKQFSFLSKDGKTKIHAVKWMPESGEYRAVLQITHGMVEYIERYKPFAEFLNDQGVLVVGHDHLGHGASVASEEELGYFAEPDPSDTLVEDMHTLRTTIQTENPGVPYFMMGHSMGSYMLRKYLCIHPEGVAGAVIMGTGAMPDSTMKFGLFLCRTIALFRGWHYRSRLMQSLSYSKPYKRYDLYGKDYANSWLSKNVENVKAYYADPRCTFLFTVNGYKGLMEAVLFDNQMENIKKVPKNLPLFFVSGADDPVGDLGEGVKKVYGMYKDAGVSDITYRLYEDDRHEILNETDRDQVMADIAAWLNVHVELMKKNGMRVTSLFLAAVMLASAPVTASAADTSANVEGEVVVDQTSQDQTSAESQNQAGQDQTSAEAQDQSQASAAENAATGANSDNVTIQADDKPYLALGADLTDVQKNTVLSLMGIDPANLGNYDVVYTTNAEEHQYLDSYISSSQIGSKSWSSVVIVKRDKGNGLNISTRNINYCTVGMYKNALTTAGITDADIIVAGPQEISGTAALVGVFKAYQEMTGETINADIIDASLNELVVTGQLEQSIAGLSDEEVEEFIAYIKSVIAQNDLKDEASINQAIDDACSKYNVTLSDSERQQIVDLLLKITSLGINLDSLVDYAESLYHSFKDGGGDSSVLSSVGTFFSNVFSSIADFFKGLFSMVDRKRRLDCANGIRKADIVLKHGKVLNVFTEEILEADVAICGDTIVGVGSYEGEREIDCTGKYLVPGFLDAHMHIESSMVSPGELSKVLVQAGTTTIVADPHEIVNVCGVKGMDYFLKCAGKALVHIFFMIPSSVPATDVETNGCGEFLASDMMKYVDDARVLGLGETMRFVECYQGERRMSDKLELFAKKHIDGHAPGITGKAVQAYRLAGVENDHECANSEEVLDKLRAGFHIYIREGSGAKNLETLIRTLLDANVALDQCAFCTDDKHIEEIRKEGHISTCIRKAIALGVPVAKAYKMGSYQPAMFYGLKGYGAIGAGYHADIVFLDNLEEVRPTDVMKDGRILGEEDYKKDYWVPVPEELLHTVHVGELSRERIQLACNGKTDVIQMNAHQIVTTHLVEEVPTENGYFVPNEVYNKICVVERHGKTGEIGVAPLKGFGVKGGAVATSVAHDSHNMIVAGDNDDDILLAIRTVEEQQGGYAIVSGGKVIDVLPLPIAGLMSDRRYEEVTEKLSAMQKETRELGISENVDPFVTLSFMALTVIPEIRVTERGVYLFMQEKIQIISDGSLDLSRELTRERDILVVPFYVSFDGETYLKEGVELDIREFYQRMVDHPDVFPKTSMPSVDDYYQVFLPLAKQDVPMICICITTKFSGSMQSATTARDMILEEYPKARITVIDAEINTVLQGLYVLEACRLRDLGWEYDRMVKRLLAIRESGRIFFTIGNIDYLKHGGRIGKVMGIAGSALKIKPLITLKEGEIFASGIARSREKSMQKVIEMLKAYLDERTAKPGEYSFAIGYGYDYEEACHFREMLKDLVRERLGIDEIEIYQIGATIGVHTGPYPIGVGIIKRADWEAMVFNTGAALLDAIVLAVVSKEEEGTYGYKITQDVRVAIDVSESTLYPVLRRLQKDGCLIVYDRECGGRNRRYYRITDEGRKKLDDYRREWDDYSSKISELFSEEGVMNKDEFLRQLEVLLSGISQEERTEALAFYRSYFEDAGEANEAKILEELESPQKVADSIIKDLGVQAGEAGASGAQGAAQGSPAGAVTGAGWNPAAQGSPAGAVTGAGWNPAAQGSPAGAGWNPAAQGAAQNAAYSAQEKDGMPGWAIVLLVITSPVWLVMILVILSALLGIVAALFGIAIAVVAVMGALLICGVVIFGAGIGSAFAGNPAIGIGLMGAGLIVLAIGILAVVLVVWIFGGFLPWALRGIWKLCKKPFNKRKERAVAMKKFSKICLIIVAVLGGMGLLLGSISTLLGGGFGAVRRMAQAGEFDAGNWHIRPDGVYYSSDEDTEDERWSDSGTGSGWTDGAVYTYEAAGIKNLDVDIDAAEICVKQGTDADNLVVTTYNCKEKYYMADKKNNTLQIQYNLQNQIPVNSSATIVIEIPEGMTFNTMDFAIGAADADFASGSVNCRKLNLNVGAGELTGEDFIVKETMEVKLGAGDVELSGGTYKDVKMDCGIGSFDLDDITAENVKAHCGMGDGTITMLGNEEDYNYKMSCGMGDLMVNGESYADLSGSYKVTNPGAIGTIDLDCGMGSIDFDIEMNILEYENYQEKIPHGNPLFPYITYPCSIPLDFSRVPLHWHDEMEIIYIKKGTGAITVDFKSYVVTEGTIALILPGRLHGIEQYMQESMEYENIIFHPGILISKKADTSNTEFLAPLLSGALSVPLLYQPGSPCYAEIAACIDANDEISRTNPPGYQFFIKSQLFMLFYILFSKCLLKEPAKRDHKSLEKMKLILKYLENHYMERITIADISAEVGLSQSHFMKYFKNTMGTSFIEYLNEYRLTMASRLLISSESSILAIAEEVGYENLSYFNRTFKKRFGMTPRDYRKQSTKQLMNVQEIVNNRYGKGIAQCSNEEIYYALLEMTKSMAKEKESNEGKRKLYYISAEFLIGKLLSNNLINLGIYEEVKQVLAENGKNLAEIEEVEPEPSLGNGGLGRLAACFLDSIATLGLNGDGVGLNYHYGLFKQVFEHNLQHEEPNPWIEKESWLTKTNVTYPVQFGGFTLQSRLYDIDVIGYENRTTKLHLFDVETVDESLVGDGINFDKEDIAKNLTLFLYPDDSDDKGRILRVYQQYFMVSNAAQLIIDETLARGGDLHKLNEYAAIQINDTHPSMVIPELIRLLMQRGILMDEAIEIVSKTCAYTNHTILAEALEKWPIHFLEKAVPQLLPIIYELNSRVVRKYDDKSVAIIDDEKRVHMAHMDIHYGYSVNGVAYLHTEILKNTELNNFYKIYPEKFNNKTNGITFRRWLLHCNHELADLIESLIGPGFKKDAMELEKLGALVDDASVLQRLLDVKSSRKTELKDYLAKTQGIVLDDNSIYDIQIKRLHEYKRQQMNALYVIHKYFEIKAGKKPTRPITVIFGAKAAPAYVIAKDIIHLILCLSELIAKDPEVSPYLKVVMVENYNVTLAEKLIPAADIHEQISLASKEASGTSNMKFMLNGAVAIGTMDGANVEMHQFVGDDNIYIFGESSEEVIKHYEKADYVSRSYYENDANIKRAVDFIVSDEMMAVGCRENLERLYNELLNKDWFMTLPDFEDYVATKERIYADYEDRMAWAKKMLINISKAGFFSSDRTIAQYNEDIWHLMLQNLYISFTERSAARRSFLYENSGNRENAVQNPAAGILYKVRGFFIIRKRQGSSLENKKELCPEMEKMMRYIDMHCDTLGSALAQKTETFLELDRTMVDGLRLQQAEAGAQFFAMFLPQRNDPDWFGLEEMPSAEVLMRKMYDIFCHTMEQYGDRFAAAHNAEELKQNQNEGKISAFLTIENGSLIDGKMDKIREIYDLGVRLVTLTWNDDNCLGHCHSQKPEEMSRGLTGFGKEAVRYMQELGILVDVSHLSDGGFRDVAEASRRSGVPFVASHSNCRALAPATRNLTDAMIRELAECGGVAGLNLEPTFLNEDETDKVSRIERICDHAMHLIDRGGIECVGLGTDFDGISGEFEISDCTKLPLLFDALRKRGLSEDAVEQIAYQNTARVIRDGMRMRRRMEINHHRTYRGKAAVFLLVTAALLAGCANERTEDELSYRKIGIESMQSGDYEGALAAFDGALACCTGKITDLEIDICYYKAAAQYAAQDTEGALETYNAMIDYDGKNANAYYLRGCLKLGTGDTDGAKQDFADAVKYNHSDYELYINIYKNLAAYDLAEDGTAYLNDAFSIKGNDAESLAYRGEIYYLLGQYDNAIKELTSAIDAGSAEANLTLAQVYEAQQDTANAQTYYQAYVDAGVADSEAMNALAQIEMGKLNYSGALSYIEQGLSMESVPNRRALLQNQIICMEYTGDFAGAYEVMTAYTAAYPDDAEALREYTFLKSRVDTPAGTEVQGEVVVTEDSGTDNATDGTDSGTDGTDSGTDGADAGTDGSGDSGQMAEIIELEDQIEKVILVGVSEQDGDDAEDSVAELAELVRTAGAVVVGTLIQKRELMHPGTYVGTGKVAEIAAMIAERGATGIVCDDELSPAQLKNLEQMLDTKVMDRTLIILDIFAARATTSEGKIQVELAQLKYRLSRLTGLGRSMSRLGGGIGTRGPGEKKLEMDRRLIKDRIAQLNRELKEVRQHREITRAKRTRNGMPVAAIVGYTNAGKSTLLNRLTDAGVLEEDKLFATLDPTTRVLELPGRQEILLTDTVGFIRKLPHHLIEAFKSTLEEAKYADYILHVVDASNPQHEKQMHIVYDTLYQLDIREKTVITLFNKQDAVTEREPLHDLRADHTLAVSAREGTGLDELKELLAELLRENKVLIERTIAYADAGILQQIRKQGELLEEDYRPEGIYVKAYVPLELYGKLMTILIKNGRVINPATGTDETLDVLVENGVVARTEKSIKEKCDRVIDAKGCFVMPGFIDMHVHLRDPGFEQKETIETGARAAVHGGFTTILAMPNTKPVVDNPDVVNYVHNKAKTVGAANVLQVGAVTKGQQGKELSDIEGMVKAGIPAISEDGKSVMNAQLYREAMELAAKYNIAVLAHCEDINLVNGGVMNEDVNARELGLGGITNSVEDIIIARDIMLSRDTGARLHLCHCSTKDSVSMVKHAKMEGIHVTAEVCPHHFTLTSDDIRKIEPTVDTEKKVAIEADADTNYKMNPPLRTKEDVQALKEGLRDDVMDVIATDHAPHTFEDKNTSMKSAPFGIVGLETAACLTYTELVLGGYLTPMQMAEKMSYNPAKIIGIDKGDIEPGKVADIVIFDPDETYVIDKNTFFSKGRNTPFDGRKVTGKVRMTLVNGQVVYEDKEKMHTTQQKFEETAIIIKQEEIADDIYSMWLHTEQIAAHAKAGQFVSVYCKEGSRLLPRPISICEIDRKDGALRLVYRVAGKGTEEFSSMHTGMQLKVIGPLGNGFPKQEKKAFLIGGGIGIPPMLELAKELNCEKQIVLGYRDELFLLDEFRKQGEVYIATEDGSVGTEGNVLDAIRENGLTADVIYACGPLPMLRALKEYAAKEGIECWISMEERMACGIGACLACVCKSTEKDAHSNVKNKRVCKEGPVFRAEEVDFMNLGIDLCGVALKNPVMTASGTFGSGEEYSEFVDLNKLGAVVTKGVANVPWEGNPTPRVAEVYGGMLNAIGLQNPGIDLFIDRDIPFLKKYDTKIIVNVCGHTTEEYIDVVERLSDQPVDLLEINISCPNVKEGGIAFGQNPKMVEEVTKEMKRHAKQPVIMKLSPNVTDITEMARAAEAGGADALSMINTITGMKIDIHRRCFALANRTGGMSGPAVHPVAVRMVYQSAQAVKIPIIGMGGIQTAEDAIEMILAGATAVSVGTANFYHPHATEEIVDGIRAYMERYQVEDIRELIGAVHDRMREKIFNIIQIGDKSNRISRAFDIFITITIVSNILVTFLQTFEELDFLSGFFFVVEVITLFIFCVEYVLRIWTADLLYPGMRKCRARLRFMVSFDGVVDILTIVPVFFLSGFVIFRMLRVARIFHLFRLNARYDSFNVITTVLYEKRNQIISSVFIVVILMLASSLCMYSVEHDAQPEVFRNAFSGVWWSMSTLLTVGYGDIYPITTLGRLMAICIAYLGVGVVAIPTGIISAGFVEQYQRKSSISNIRDADIKEIAEIFVDRRYAGKTVGEVQDEQQLTVFLILRDDLSILPQKDTLLKLNDIIVIRGRKGVSMWIFYAFGSALFAGLTSILAKCGIRHTDSDVATAIRTIVVLIFSWIMVFVVGAQDGIAAVSGKTWLFLILSGLATGASWLCYFHALQAGDVNKVVPIDKSSTILTIVLAFLFLGEEVSALKIVCVILIGAGTFLMIQKKETEKSAEQEKKSWLLYACLSAVFASLTSILGKIGIEGLNSNLGTAIRTAVVLLMAWIMVFAKGKQKEIGRIDRRELGFICLSGLATGGSWLCYYKALQDGLASVVVPIDKLSILVTIAFSYLVFHEKLTKKAAFGLVLIVAGTLLMILMLEQLMDLDSGFLMYIQEFMRNDAATRTFRGITTLGNAGAVWIAISLLLLVPKKTRRIGCMGLLALVLSLLFNNMLLKHLIARSRPYDCIRGLIPLITPPTDYSFPSGHTAASFAVGVLLFRKLPKRYGIPALVLAALIGFSRLYLGVHYPSDVLAGALLGTGISYAAEVFWLAAEEIVKKHRFCKKRETAHEMTIRKKLFWTNTFMVLLAMLVLLGIGGSMICLFKDEFLRWYGSHSQLADRYTEVYAGFPEVLESDSWDGMAEQLTDYGFRLIVIDEDRNFVYNNAKHSEEEGTEALFYTPNDAGKITTYLVESTTVLATRVTVDDNFYDIYAVNCPSELSFRGMDRGMFEMFIVVFLVVGILAIGGILLLSQIFSRRLIRHILSPAEALDVAAKRVMDGELTTPIGYPYEDEFKGVCDSFDLMQEHLREEMEKNAAYEKARTEMVSGISHDLRTPLTSIKGYVKGMLDGIANTEEKRTEYLKIAYRKSCDMDVLLSKLFYFSKLETGNMPFFFRECDVERFLRDYVEEKEPEFTERRIAAEVVSDLKAPVYGSLDTEQMIRVFDNLMENACKYANRPDDLRISIHIAENDGWIVVDFGDNGDGMEQEKLGAVFDEFYRGDESRSSGCDGNGLGLYVCRYIIKEHGGKIRAYTKDGFHVEMCLPEAAEHEKEKAMPEEGREMMARILLAEDDREIANLERDYLEMSGHEVVIAPDGEEAMKRINEEKFDLLILDIMMPKKSGYDICREIREQIDIPILMVTAKTESVDKIRGLGLGADDYIVKPFDPMELVARVKSHLLRYERLTGKHEMAQEGKEYDADDYCIEVGGLKILTKSWKVIRDGEEIHFPNREFELLKYLAMNPNIVFSKEHLFERIWGYDYMSDSATVTVHINRIREKIEEDPKNPKIIETVWGAGYRLNMKMKYITFTVPCYNSAAYMERCVDSLLIGGEDVEILLIDDGSTDRTGEIADEYERNYPGIVRAVHKSNGGHGSGVNAGLHLATGCYFKVVDSDDWLSEDAYRRLLARVKEFCTGAVAELMDQPDLIVCNYTYNHLEEGTAHTMAYRNVFPAETPCTWNDIGHFRPSQYLIMHALIYRTSVLRETGVCLPEHTFYVDNIFAYQPLPYVKKIYYMDIDLYQYFLGRADQSVNEEVMMRRIDQQIKVTKIVASCVDLDEVRQKYPKLAVYMCRNISIMMAISSIHLLLINDRAALEKRKLLWNTIREEDKMLYLRLKYTTLSGFTYLPGKVGGKITVQGYRIARKLYQFQMEKIYIAFVDTPGLFASALHGYLKQKYIHVLLSLDENLDEAYSFGRRNPAVPLVAGYEREDKERILRSFPDADYMIGAIDCTAEQKEQIREKMRLWYEHRWRYHYAVMELPFIAMGRAVHRSRHFTCSSFAAKFLSDAGITSFAKDESLVTPKDFYEWDGYTCIFRGKLRELVEEEPVRERAMLLAGTETVYEGMKDRKKIFEAVFFITVTVLALSVLFRGQNWSDLLLLIRKSNPVCLLSAVFLGLLFVCLEGYMIWRLLRLSGNDATLPGCIRYSFIGYFYSGITPSATGGQPAQLYEMCKDGNNASDSTVVLMVVALFYKLVLVVIGLMLPVVWLGHMREYLGSWLGLYVVGIVLNVVLVALLCGVMFSPGLILNIMCGVLAAGERCGIVKNGEKLRQDAAAFAGRYRETTHFLREHKGELVVIGAVTFLQRSTVFLITGMVYLGFGLSGSSLFHILAVQAAVYIAVDMLPVPGAQGITELMYAAVFGGVFGAQYVKASMVLVRGMDFYVPFCVSMLIVLAGHGVSYVRRQRKRAMNSCITCKEAIEHCMSTHTFAFAHLYGDEKIMDMHIHNCCEVYYSISGGKQFLIDHCLYDIRPGDLFLINQFESHHLTQIDQQTHERIILSIDPEYLSKLSTGVTDLGHCFSFRDTRMPHQIHLSPKEQNRFMYFIHELHDDGGMGEDLLDQAIFLELMVFLNRAFAARCTDAAAPAQAPSSNYHAQVDAILSYINSNIGEPLTLAGLSAHFFMSTSYLCRIFKEATGTTINKYITAKRITLSKSLLDQGCSVSEACEACGFNDYSNYLRAFTKAVGISPKKYAQFHSMVNFSLEGKVALVTGASYGIGFAIASAYAQAGATIVFNDIKQELVDKGLAAYEELGIKAHGYVCDVTDEEQVNALVAKIEKEVGVIDILVNNAGIIKRIPMCEMSAAEFRQVIDVDLNAPFIVSKAVIPSMIKKGHGKIINICSMMSELGRETVSAYAAAKGGLKMLTRNIASEYGEYNIQCNGIGPGYIATPQTAPLREIQPDGSRHPFDQFIIAKTPAARWGSAEDLQGPAVFLASDASDFVNGHVLYVDGGILAYIGKQPQMTEKMSREKAEWSPEWLTIREFIHITPVNLFHKEQEEGEKQPEAEQQLTAEFRRNLHVLVRARFTLETAQENLTLRLTADDHYKLYVESGFVAEGPAPGYPDHYYYNEIPLGKMEAGEHCFGLHLYYQGLINRVYNSGDLRFAFATELMDAQDCRIPLRFCYKRTDAYSGGTIGYDTQFLENFDSRKFPEGWSSAEFDDAGWKTPAAAEWADYRLYLQPTRMLCGERIKPEKIEICEDGSIRIDVGEEVAGSLCLTAEGSAGDTVEIFCGEELDESGSVRCEMRCNCSYHEIWTLTDGCCSLEPYDYKGFRYAKLLPGKGVNIRGIFVQTRHYPMEEGAEVMSSEKRLEQIFSICKNAVKYGTQEGYVDCPTREKGQYLGDAVVTAHAQVLLTGEMQMLLKCIDQFAQTRAVCPGLLAVAPGGLMQEIADYSLMYPQLLALYYRYTGDAAALLPYYETALGMIRHFAQYERADGLLVQVADKWNLVDWPENLRDDYDFALTRPVVGAGCHNVINALYLGAKKTLNGLARVLGREDPYELEKPVLAYRRAFYRKETGLLADSETSSHTSLHSNVYALYFGLLEEAEEAPVVEFLEKRGFSCGVMLSYYLLLALARRGRYESVYRLLLNDSDHGWCNMLREGATTCFEAWGKDQKWNTSLCHPWASAPVPVILEEIAGIHLSPEGGCDFAPHIPKEVDYFHTSVRMRGKTYTVTKQDGEIHAAIDGIEQPKADAKMLYPRENRVRGVIDLGGVWNFKLGDEKEPGDSFAMGEDTELMAVPASYNDQKDDPKYRNHYGWAYYERKITVPSYLKGQRLVLRFDAVTHAAKVYLNGRFLTAHKGGFLPFEVDVTDQLVPGETAELVVAADNRVNHSTLPVGNEGSTAFFGSDNPGVPSVEAAKVWRKPQNLPNFDFFNYAGINRPVRIYTTPAAYIDDITLVPDIDGDTGVVNYEIKTAGSVCEDEVRIRILDADGNEVAAADGAGGTVRIPDARLWWPWPGEPYLYTASVTYGEDLYEETFGIRTVAVEGTQFLINGKPFYFKGFGKHEDAAFRGRGLDVCLDVKDINLIHWLNANSFRTSHYPYAEEMYQLCDREGIVVIDETPAVGIGAGDKIDPYKTFHIREHHEQVLREMIARDKNHPCVVMWSMGNEPDTEHFPESAYDYWHSLYELTHSLDPADRPVTFVCCQNNYERDLVTRTMDVVCVNRYYGWYNLSGDLDAACYALNMELDFWEKQNKPVMITEYGADAVAGIHESVPEMFSEEFQKEYYRRQNAEFDKRSFFIGEQVWNFADFATIQGCMRADGNKKGLFTRDRRPKMAAHYFKERWGQIPNFEYKMGNERFDISIPKEYLTRDKARLLYVSSATYGGDWISTPHTHYCSELFYVIDGVGQFQVEDNIFPVSANDLVVINPNVSHTELGFNANPLKYIVLGIEGLELSVENNNANFCIVNFREIKDTVNFYLKVMLREIETRSAGYETVCQDLMEILIVLFGRQTNFSTILSPANKRASHLCDSVRRYIDQNCGDDLSLEHLAKFSHVNKYYLVHAFTDEYGISPINYLMHARVKKAEKLLATTDYSLSVISHTCGFSSSSYFSQTFKKVAGVSPSSYRKTVKSDHGEMEDLSRMRKKLVGTLLIAAMTASTLAGCGSSNSTAGTSASGGAAETSPAESATEAEGTDAADGEEVLTVWCWDPTFNVYAMKQAEAIYQKDHPNFKLDIQEKVYTDIEQNIITAAEADNYDTLPDIFLMQDNSFQKNIANYPEVFTELSDSGINFDDFSGGKLGDSTAEGKHYGIPFDNGASIMAIRSDMVEAAGLTVEDFKDTTWSEFMELAKKVVDANGVPMLTSSGGSEIVIEMLQSAGASPIVNGEVHLADNAALKKAIEVYKQLIDEGIMVDYTDWDQYIASMNKGEAAGVIQGCWIMSSIQSAEDQSGKWAIVNMPALDGIDGATNYANCGGASWAVSSNCKNTELAFDFLKTTFGGSVELYDDLLPNAGAISSYLPAAQSDVYNQTSDFYGGQAVYKDIVEFAGKVPAINYGAYYNRSALTDAITNVVQNGADIDEEIQNAQDAVEFNISEMRSRYFFTGEDAQVFTEIYVAQSGVKAAQNIAKRYSFMKQKKAKMSLEKKHNLTGWAFLIPAALLIFIFCFYPMIQAIILSFTKKGSGFAGLANYQRILKDKTFQQCLFNTVFYFIIQVPVMLLLALGLAQLLNSPKIKGKSIFRTLIFLPCATSLVSYSMIFKSLFAQDGLVNNIITTLGFDRVDWFQNAWAARFVIIIALIWRWTGYNMVFYLAGLQNIDDSVYEASYIDGATPFQQFMKITIPLLRPTILLTAIMSTSGTLQLFDESVNLTSGGPGKSTMTLAHYVYNISFVETPKFNYAAAISVFILVSVAVLSAIQMKVGDKRDMTKVKTTIAYIILIIASFLSAFPLYYMICGATNSSIDIVRGKLFPGIYLMENYQSLIANQNLGRAMFNSFRNAIVITVIALLICSIAGYGFEIYHDKGKDLLMNILLLAMMLPFVAIMIPLFKMFSSWKLVNTWIALALPSLSTPFLIMMFRQAARSFPHDIIQAARLEGLSEIRIFFTMFLPIMKSTYGAAMTVTFMNAWNNYLWPTIILQDSNQITMPMLVANLKSGYSVDYGMLMLGVLICTLPTAIIFLCLQKSFANGIAGAVKMTGSYRTYYVNQKTGRDSNDGLTMDSPFASLFQVNRLKLYPGDKVLLARDSIFTDQFLQMKDSGTREHPIEIGSYSPEEEGEGKNPLIAAGGQGIWYQDYGTTLDSPAHVYQGYVSSAVLLYDVEHVVIHDIEISNQAVEILGEDYSAPHKMNRTGVAVVAKDKGVRSGITLRNLSIHDVNGNVYDKHMNNGGIYMTALKPADEKATGVARFKDITVEGCFVYKTSRWGIAVGYTYAHDKFQGAELPEDTFLKYGHENMVIRDNYVKAAGGDGITAMYALRPLVEHNTADSVACEINDRIYCRPENRAGKVAAGIWPWKCKDALFRCNEVADTRLNQDGMAYDADSGDGTIYEYNYSRQNEGGCIMFCQSEAIHNSFCHNVSYDDLGGTVSPSENPDALLAHNTFYVREGVPFVRNKMGGGTYTEEDNTIIPLMTLKEGRVTIPTNLDVVPETIELMKRWGADAIRDCDGTEFPEELVRTGAKIYATYYTTRKDNEWAKANPDEVQQCYVMTSFYTAVDTDLEIPLMKGISQELMMVNTRDDKKRWWEVVDRSTGNVVSADHWEYEEEKGCVVIHDAIPFHEYTVSFLAYIIWDPVHMYNAVTNDWKNFEHQITFDVRQPKTHKYSLERLRKYCADHPYVNVIRYTTFFHQFTLMFDELKREKYVDWYGYSASVSPYILEQFEKEAGYRFRPEYIIDQGYYNNQYRVPSREFKDFQAFQRREVAKIAKEMVDITHEYGKEAMMFLGDHWIGTEPFMEEFATIGLDAVVGSVGNGSTLRLISDIEGVKYTEGRFLPYFFPDTFCDGGDPVKEAKENWITARRAILRKPIDRIGYGGYLKLTLDFPEFLDYVENVCNEFRELYENAKGTIPYCVRKVAVLNSWGKIRSWGCHMVHHALYQKQNYSYAGIIEALSGAPFDVRFISFDDILANPEILKDLDVIINVGDGDTAHTGGGIWENPAISAAIREFVYNGGGFIGVGEPSGHQFQGHYLQLADMLGVEKETGFTLNYDKYNWEEHPDHFILADTTKPVDFGEGKKNIFAYEDTEILVQREKEVQMAVHEFGKGRCVYISGLPYSFENSRILYRSILWSTHGEKDLHQWFSSNFNVEVHAYVKNGRFCVVNNTYAHQKTVVYRGDGSSFPLEMEANEIKWYNIMVQLLIVDDEPLVQIGIRSMLNWESMGIEIAGTATNGRQAYDIILEKHPEIVITDIKMPIMDGMQLIEKCQSQEHPPLFILLTSYEEFALVKQAISYQVLDYLVKLELTEDVLNAAIQKALGILEKERKQAAIPETGSDLSLLQDNFYIRLLLNLFETEEQFATQCDLLSVRFTAAGYTVAYLEMQNTRQSASAVASSDITLYRSSYQMIRNLIVKYVPCRILFLDTTHLAIIFSLTKEQTGSYHQLLTDALTQTGDMLYNYYSIRILASVGSLVENPRDLSASYSDARQIFPDVRQSDSAVIFADEDNPAREEHNVFNIAIFKDELQKAFNEYDPEALSAVFHDIIDLFSNDKRHYSQALSAASNVLHLTLSCLSNGEEQLNQIFGESANGYNCLYEAETVPQVLSWMTVLCDGLCRLFSEHNKDYKNRTISAVKKYINEHVDEKITLNQLSDVFNISPNYLSILFSKYNDMGFIDYVNHAKIECAKEMLDEGTLKIYEISDKLGYESAFYFSRVFKKVEGVSPRDYINRTMKKKFTTIRSRITLTTITLCIFLSIAVSYISYSFYYKSVKQNMIRTAESSLTLLGSSIDSNIQDAYSFVRNCQANSFILNYLSSQGSQSARITASTYLKGSYNSYDGRYYIKRIFIASYKNRDFIQALASTNNQPFHSADDIRDLYFFDSYYSSPSYSYSEGILTTDGGSQYLPIIRPLYSQYNSDELGFIYIEMSPNVVTIPLKTAGTYQNNDFYLTLEDHSYVYSNYTLTDANPSYEITGDLSSIASFSDTIVKEISNANGKFVSISVPLAAEHCYITQLITVNTFYGQLASIIFVIVACAVITGIILHTIFNHMINHPVQELQVRMKHISEGNFERDSSIEWQHELGDIGRSINDLAEDVKTLMDQRIRDENEKREYEYKMLQSQINPHFLYNTLNSIKWMATIQNAPGIAEMTTALSRLLKNIAKGTEKSVPLSAELSLLDDYFTIQKYRYGGTISLEYRIDDEAALSCLIPRFTLQPVVENSIFHGIEPKGTPGTITIHIFRKNDAILQIDITDDGVGMTEEQARQLLSENKNEKTEFFREIGVSNVHKRLQYEFGEDYGLRVESRLSEFTTVSVLLPFAPQEDIGMKKRVLSMLLVASMTGALLAGCGSGETASTDASADAAADTNTAAAGTETAADAAATDGEAVTLKWAIWDQETTPYWNALKEAYEAANPNVTIEMVDLGSTDYMTVLATELSGSGSDFDVVTIKDVPGYATLVQKNTLESLDDYITDAGINLADFNGITDQVTVDGSLYELPFRSDYWLIYYNKDVFDAAGIAYPSNDMTMEDYDALARQLTDTTYGSQVYGCHYHTWRSAVELFGILDGKHSILDGNCDWMIPYYDMILSEEDDGVCQTYTDLSTEGLHYSAAFSNGNVAMMNMGSWFISTLISNLDSGEYDSSLCGNWGIASYPHPDGAEAGSTIATITGLAVTSASANKDAAFDFVNWVSGTEGAKVMASTGNFPAIMTDDVINTIAGMAGFPTDESSKEALNITNAYLEVPYAENVSEINSILDTYHTSIMNREVTVEEGVASMNEQVGKILNQMVMDKKKAVKLEQMEAEMARLWEQSQNETDNKKKQKLIQSRNKLQWKAAAMRSGRKLSKQTRDDLVAYSFIAPNFIGFAVFTLIPIIFAFILAFTEWDGNNPIQFVGLSNFLKLPSDTFFTASLKNTIIYCVGTVPLTMVVSLALAIVLNQKVKGRGFFRTVSFFPYVASLVAITTVWSMIFHPTKGPVNYLLMTICGIEQKNLPNWFSGNLIMLTLILFSVWKYMGYYMVIYLAGLQGISSELYEAGSLDGATTWQKFKYITWPQLRSTTFFVVVMLTINCFKVYDIAIMLAGGSQGKLSNSASVLVYYIYENAFDYWKLGYASAVAMVLFVLVLAVTIIQFAYEKKLEDMREIMTKQKKETSMKRNNLIKKFFLYLILLIITAAMLIPFIWMLSASIKTDREVFQMTPFVLIPETPRWSNYVDIWTKIPFGTFVKNTVFLTIVVTALQLLTSSFAAYSFAKLEFKHKNVLFMAYIATIAMPWQVYMVPQFIMMRKMGLNDKLLAMICLQAFSAFGVFMMRQFYDGIPNELCEAARVDGMSEYKIYSHIMLPLSKPALSTLTIFTFVATWNDYLGPLIYLKSQEKKTIQLGLKMFIGQYSSQYGLIMAGSVLSLIPVLIVFICLQRYFVEGIASTGLKGMRYEEKPQITEQEIREAMDFSTAQVKRNLPEFTTKFQKAYSENGFYAPTDNVDWTTGFWTGEIWLSYEDTGKDIYKKAGEIQIDSFLNRIENKIEVDHHDMGFLYSPSCVAGYKLTGNETGRKAAILAADQLIRRFHPVGNFIQAWGAMDAPENYRLIIDCLLNLPLLYWASEETGDPKYRDIAEKHIHTAVANVIREDHSTWHTFFFDMKTGAPDHGATCQGYRDGSAWARGQAWGIYGMALAYKYTEREEYIQKFRDVTDFFLAHLPKDMVPFWDLEFTDGDDQPRDSSSASIAACGMLEMAKYLKPDEAEAYRATAKRLMKALYDGYAVKDPKESNGLVLHSTYSNHSPYNTCNHYGVDECNIWGDYFYMEALMRLKKDWNPYWMKREAFFDRDASHYYCEDGKAVGAYCREQFPEDVAQTLAVADGVCRKYFLFNSKWDLEQTDKPVQFDGAIDWTYMPADDPEFVWQFNRHRFFMTLGQAYQMTGDEKYARAFMEIAEDWIDHVPLNEKYAAGPWRSLDTGFRGEYWSKAIWLFHDSPTLTEAFLQKYYDSMILQAEHIMECHSAYRYMSNWGVIENHGLFEIGVCLPQSEKTKQFIAFAVKNLEVQVRMQIMPDGVHWEQSPMYHNEVLHCLLDVILLAKRNGIALPDVILRQTEKMAMADVAWLKPDHHIVMMGDSDDVDVRDRISVAAYLFLNPVLRFGGFDRLDYESIWDLGMKAGEEYAVMERRKPDFTSLFLEHSGNTYFRSDWSERANFLHLHSGTMGAGHGHSDKLHIDLVVNGEDVLMDGGRYTYVSGPKRFSYKDPSGHNTITVDDLPFTVCKDSWECSKLSQPVKENFRCMELAEFAQAGQLGYMDLPGGVYVNRKVVYIKPDLYILVDEMYTGDCHTYQQYFHFNNHGAVTLTAPGEKKFPCVAYRGKMAEADFYFVSAQVKAELKRGHIARHYNVEEENTVCKVTKPGDGFTSLITVIDAHPGRPLSIEKLPVRSALKQTDYPETMAEALKITTGEKEYVVILCHQEVNSPTDLVEADGCMGYGNVIVFDKAEDVLVGDVLNWMRKKLEHWWTYYKGVVIFAVVLAAAVLYVADTMGKKEKTQILMGEVVNNVQDDAVTTQMEEAILAGIGGDPNGEEVVVDTALTMDAAALGQTPIADANTQDSLATITTYVYAHELDFMILEKDVFDYYCNLNAFADLGELLGAGACEALGARIYEKNGVACGITLTDTAFVKQYGITLLDPVIGIVSGSERKEQAVGMLRWIFEENTGVAAAFSAEEYKAMISQEETGRKDDGKNVMGKMFDMDNPVWRFMGKVTDMFFLTCLWLLFSLPVVTIGAATCALCYCSMTLASNKEGYIREDFVRAFKENFKSATIAWIGMLALGIFFGADLYFYYHLAGGVGTVFFWIFLVLSVIFVFVALYVFPLLAWTDADLKKTLALAFVMSFKNFGWTLLMLTSAALFITAALFVFWPLLFVSAGGIAYVHAKILTFVFSQYEWRDERKDGSDNDMAVITIKIQNKDGMTLSVARGEDEAALVYTKEYEEGDEIIFEISPKNAFYELMADDALGAATVYVTGDVHYRIPFGERKISYSPKTFSGNRHLITAKLADMTCFGSCRNLAKNVMDQHGETNCYPHASANVETRGEAVFAARNAIDGVTVNDAHGEWPYESWGINRREDANMKLEFGRKVAVSRIRLYTRADFPHDNWWKQVTIRFSDGSEAVAELEKSEKPHEIVFEERVITELTLEKLKKADDPSPFPALTQIEVYGREAEKLMSAINITNARKELYSLVEDVNRYSEPALIVSKKGNAVLVSENDWNAIQETIYLNAIPGMVESIRSGMDTRLEDCVPEEDVEWMYRIVYDKQAVKDIKNLKSARLDDKAKKLIEVIRETPFQNPPPYEALVGNLQGVYSRRINIQHRLVYQVYSEPVEWKGMRYDGTVKIIRMWTHYDGVCMEQYKQEFIEFMVESDVLKFGEFTLKSGRKSPFFMNAGAYVTGSQLMRLGEYYARAIHETYGDDFDVLFGPAYKGIPISVVTAVAFHNLYGKEVRYCSDRKEEKDHGADKGSFLGSKLKDGDRVVMIEDVTTSGKSMEETVPKVRGAADVTIVGLMVSLNRMEKGLGGEKSALEEIREKYGFETNAIVTMEEVVEHLYNRTCQGRVVIDDTIKAAIDDYYKQYGCNMAATRRKHRLAAGILFLIYFVVLFYFLFFSEKMGRTYSERAYHYNLVPLKEIARFVKYWRVLGMKAVLLNILGNVAAFLPFGFFLPVFSGRCKKFWRTAFYSFELSLLVELLQLVFRVGSFDVDDLLLNTLGGMAGYGLYRLFVRYYHQRNQRGKESGETTMARRHRNGYRFTEKTHSKRGVAALFLSIISIGILVAAVVSSFDSRGNGSMYLGSAGVTSMLIGICALVLAVKSLGEENSFKLFPYLSTLCSLLITGIWVALYVIGFLAMTDFEKQMAFIMELDKIKKITRQTYLSDGSRKENDAEHSWHLALMAFVFADYANEKIDVLKTMKMVLLHDVIEIDAGDTYAYDTEGNKTKRERELKAADRIFGLLPDAQRMEYRGLWDEFEAMETAEAKFANMLDKVQPLLLNNASDGKSWVEHGVRESQVLARNSRTHEGSEKLWAYAKSLIEENVKKGRLQPMGYQECYKETNELAAERYELVAERIAEIAEAAQAPEPFAEYFRTNAAYLQSLRALYEKGKSGSLAARSMEECEADNEALYGEILPEAYGHSYANPAYAAARLGETFGGALSLLAAHLRTACGEVFRGNLVQLTIAMELFVEVYNCFEGAAADALPQEKEVQQIVYWYFHDYREIFDERSVRRLVNPAEDFEKEIVMQADLSDLRYLYRYGAYIGENERQIAAYLNTLPEADIQAMADTYTEGYQIGFETTGKDLSKKTAAQVRYPIGFERMVRAAVCNFEKMGLEVTMLASGTAANKQYDYDHREDRAYYLDKAYVERGLETWKNAFEEEKVHANGMAGPAVIEVFGEEPFSPETKKEAFRYGEKQQQLCVYEMSQRGQITNQYIKGEERSFTIIAYPLPSIGARFEEIFAETVKINTLDYMLYRNMQQKMIDVLDQADRVHITGKGANKTDLYVNIWKLRNPEGETAFENCVADVNIPVGEVFTSPVLEGTNGKLHVGQVYLNGLNYKNLEIDFKDGMVEKYTCTNFEDEAENKNYIRDNVLMHHETLPMGEFAIGTNTTAYRMARDYDIADKLPILIAEKTGPHFAVGDTCYSHEEDNLSYNPDGKAIVARENTVSAQRHENPEKAYLNCHTDITIPYDELDKITVIRKDGTTEDIIADGRFVLAGTEALNGPLDRMAKVGIVMGSDSDMPVMAKAADILEKLGIDYEMTIISAHREPDVFFEYAKSAEAKGFKVIIAGAGMAAHLPGMCAAIFPMPVIGIPMHTTSLGGRDSLYSIVQMPSGIPVATVAINGGANAGLLAAKILATSDDAILQKLKEYSKELKEQVQAKDARLQEVGYQNYMDYKNSGVDIEAGYKSVELMKKYVKGTMRPEVLGGLGGFSGAFSMESFKNMEKPTLVSGTDGCGTKVKLAFLLDKHDTIGIDCVAMCVNDIACAGGEPLFFLDYIACGKNYPEKIATIVSGVAEGCKQAGCALIGGETAEHPGLMPEDEYDLAGFSVGIVDEKDIITGADLAAGDVLIGMASSGVHSNGFSLVRKIFSMDADTLNTYHEELGKTLGEALLAPTRIYVKALREVKEAGVRVKACSHITGGGFYENIPRMLPEGKHAVIRKDSYEVPAIFQMMAREGKVEEQMMYNTYNMGIGMIVAVDPADVDKTIAAMKAAGDTPYIVGEIKDGEKGVTLCMLKVAVLVSGGGTNLQAILDAIDEGRITNARVDVVISNNPGAYALERAKGHGIEALCISPKDYESREAFNEAFLAKLDSYQVDLVVLAGFLVVIPEQMIAQYRNRIINIHPSLIPSFCGKGFYGLKVHEGALARGVKVTGATVHFVDEGTDTGPIILQKPVAVEEGDTPEILQRRVMEQAEWIILPQAIDLIANGRVSVANGHVTVEKMKVLVVGSGGREHAIVTSVAKSPRVDKIYCAPGNAGIASLAECVAIGAMEFDKLVAFAKEHAVDFTIVGMDDPLVGGIVDVFEAEGLKVFGPRKNAAILEGSKAFSKDLMKKYHIPTAAYENFTSAEDALAYLETAKMPIVLKADGLALGKGVLICNTLEEAKAGVKEIMEDKKFGSAGNTMVVEEFMTGREVSVLSYVDGKTIKIMSSAQDHKRAKDGDQGLNTGGMGNFSPSPFYTKEVDEFCQKHIYQATVDAMAAEGRPFTGVIFFGLMLTEDGPKVLEYNARFGDPEAQVVLPRMKNDIIDVMEACVDGKLDTIDLQFEDNAAVCVVLASDGYPVSYEKGFPITGLEKFDGKDDYFCFHAGTKFDENGTIVTNGGRVLGITATGKDLKEARAKAYEATEWVDFANKYMRHDIGRAIDEVKMKHFLRLTDYTKADIYEIFHITDEILEGHYQNLLQGKSVVLFFPESSIRTRVTFEKGIALLGGQPILFPSSALDKKEDLQDVIGYLNNWANLLVVRHRDMAALEKIAASASVPVINALTDANHPCEMAADLYALSKIRNDFTMDHFLFCGVTGNIGLAWKEASEVMGFSLEQCCIPGYEMDGVPSHHCIRDAIRGKDIICTDSLPADLLSASRGCTVDLAAMKLANEGAILNPCPPFYRGEEVSNDVIDSDYFVGYEFKKHLLTVQQAIMVYCLTHMLTDASRKFHGTLDAQKAVQKQGKMDPSGCLPEVPRNIGCAEEHRRDMDAQKVAVYGLLPELKISMTKMSRLLEEFKEYLKEMNQYDHVTGLLQWDMQTTVPKLGQAAHVDALTYFSAKSFEMGTSEKLGEFLEKLAQPAEYDALDDTWRFIVKRMKRDYDRNKRIPADLYEAFVRAAAESGNAWEEAKNASDFSIYAPHLRNMIEMTKQVIGYTDPGKDVYDALLEQCEEGMDQATIDRLFEEVKTELIPLVEQITAKKMPENPTFHAYADPDAQRRVQWLLLDYIGFCRDAGAVGETEHPFTTNFSSKDVRVTNHYYETEPLSAMFSAIHEGGHAIFEQNVNPEYDNTVAGSCCYMGVHESQSRFYENILGRNINFWKPIYEKLGELLPQFKNVTLEAFEREINRVENSMVRTEADEVTYCFHIILRYEMEKAIFYDHVPVEKLPELWNQKMQEYLHITPKNDAEGILQDVHWSDGSFGYFPSYLLGSIYDGMYLEKMEEELGSVDEILADGRIGEITKWLNEKIHWYGSTRTPKEVIAAVCGKEVSAQPLVRYMKKKYTRLYGLSEEAMKRGIIFDMDGTLWDSAENVAKSWNVAIRQYGVREKELTTQDIQGVMGKTMDVIADILFAEFPEEKRRLLLKECCQVENDYLREHGGILYDQVPQTLAALKRDGYHLSIVSNCQKGYIEAFLDHYDLWELVEDIECYGNNLRQKGENIRLVVERNRLDEAVYVGDIQGDYDASRAAGVGFIHAAYGFGEIAEPVPELKTFADLKTFDISSASKTQSAWTMMTKFEELLQQINRQHVYIQTHNFPDPDAIASAYGLKRLLATRGIEASICYKGKIDRYGTGRLCEILDIELLNVEDLTEVLTDEDEVILVDSQKGNSNIINITGDEIICIDHHPYNDKCQYRFQDIRPEVGACATMIAQYFMENDIAMDKKIATALTYGIRIDTHNLSRGVSKLDIEMLYRMYDDCDYEEIHTLENSNLCFEDLVAYSKAISSIEVYDNISFADTGEDCPEALIASVSDFMLALVEVSFSVVYSRRGDGIKLSVRSEKSSLDAGKITAEALQGIGNGGGHAAMAGGFVPFTGSDGKAVILIDQIKERFFSTIAKRRMKQSRKNASEAEAEDRKWSRTGGQGNGISDLDNAGLQGLYLHIVDKGSDEDSKLWMKGKASRGGESRCEMRAGASKPQTKIPSKPQPEMQPQMWHSRACVRQEGSTVGADAFPALKGTGIRIFSTGDFSGSRKTFQDFCAGRSLCTMMYNKVDTNLNFVDREKQVREFWKDNDIFKKSMEQRKQGETYTFYDGPPTANGKPHIGHVETRTIKDMIPRFQAMKGKYVPRKAGWDTHGLPVELGVEKMLGLNGKEQIEEYGIEPFIKKCKESVWEYKGMWEDFSDIVGFWADMENPYITYDNNFIESEWWALKQIWDKKLLYKGFKIVPYCPRCGTPLSSQEVAQGYKTVKERSAVVRFKVVGEDAYFLAWTTTPWTLPSNVALCVNPEDTYCKVKAADGYTYYMAEALLDKVLGRLGTPAEKGKDGEPDTPEVKAYEVLETYKGSELERKEYEPLYACAKEVADRQHKKGFFVTCDTYVTMSDGTGIVHIAPAFGEDDANVGRKYDLPFVQFVDGKGELTKETPYAGIFVKKADPEVLKDLEAQGKLFDAPKFEHEYPHCWRCDTPLIYYARESWFIKMTAVKDDMIRNNNTVNWIPESIGKGRFGDWLENIQDWGISRNRYWGTPLNIWECEGCGHQESIGSRAELAEKSGDPKAAEVELHRPYIDEVTFTCPDCGKTMKRVPEVIDCWFDSGAMPFAQHHYPFENQDLFAQQFPAKFISEGVDQTRGWFYSLMAESTLLFNKAPFENVIVMGHVQDENGQKMSKSKGNAVDPFEALSAYGADAIRWYFYTSSAPWIPKRFNGKLVQEGQRKFMGTLWNTYAFFVLYANIDNFDASKYVLAYEKLSVMDKWLLSKLNTVIKEVDNNLSNYRIPEAARALDDFVDDMSNWYVRRSRERFWAKGMEQDKINAYMTLYTALVTICKCAAPMIPFMTEDIYQNLVRSVDQTAPESIHLCDFPVANEVYIDAELEKNMDEVLKIVVMGRACRNSANIKNRQPIGNMFVKAPSALPEFFVEIIEDELNVKKVTFTDDVSAYTSYTFKPQLRTVGPKYGKFLGQIQKALAALDGNAAMAELKANGVLALPSVDESVKLAEEDLLITMTQMEGYVTEGDNTVTVVLDTNLTPELIEEGFVREIISKIQTMRKEAGFEVMDQITIYHKSDEKVSGIFEQYGDTIKSDVLGVNVVADAAGAFADEPEVYSKEWNINGEHVLLGVKKGGNMKSGVFDKKAFIQSVRDNLKNLYRKTLEEADQQEIFQAVSFAVKDVINDRWLATQQVFDKEDPKIVYYMSMEFLMGRALGNNLINLKEYKEVREALDEIGLNLDVIEDQEPDPALGNGGLGRLAACFMDSLSTLGYAAYGCGIRYRYGMFKQKIQDGFQVEVPDNWLKNGYPFELYRPEYTYEIKFGGHVRTESREDGSLRFVQEDYQSVLAIPYDMPVLGYGNNVVNTLMIWDAAAKDYFELDSFDKGDYQKAVEQQNLARNLVEVLYPNDNHVAGKELRLKQQYFFVSASVQRALARYKKNHDDIRRLPEKVTFQLNDTHPTVTVAELMRILVDEEGLGWDEAWEITTKTCAYTNHTIMAEALEKWPIEIFQRLLPRIYQIVDEINRRFVMQIQERYPGDDGKVARMAILYDGQVKMAHLAIAAGYSVNGVARLHTEILKNEQLHDFYEMFPEKFNNKTNGITQRRFLMHGNPLLADWVTKHIGDGWITELMQLARLVPYASDAKAQKEFMEIKRKNKVRLAEYIKEHNGIEVDPDSIFDVQVKRLHEYKRQFLNILHVMYLYNELKANPQMDFYPRTFIFGAKAAAGYRNAKLTIKLINSVADVINNDADIKGKIKVVFIEDYRVSNAEWIFAAADVSEQISTASKEASGTGNMKFMLNGALTLGTMDGANVEMAEEVGMENIFIFGMSSEEVIAHERNRDYDPMQIYNSDEGIRKVVNQLVDGTFSPNDPGLFRDLYNSLLNTQCTQYADTYFILKDFRSYVDAQKRIVEYYQDKQAWAKSAILNTAHAGKFSSDRTIQEYVDEIWHLDRITVPDALVAKMMKGAGGGTIEKIQNKNGGSPAESIRGTAAVIFYLPRKVCGRRTLHSFAGKMDRKYDVITLGEILLRLSTPINGRLAQGDTLMKHLGGAELNIASEIGQLGLKTAIISKIPNNLLAAFIKNQLNASRVSENYLIEDHSDDSRVGIYYYEYGSYPRKPRVVYDRKHSSINNIDIKDVPATMFYNTRLFHTSGITLGLGGNAQKFAIECIRKFKENGTLISFDVNYRANLWSGEEARKCIESILPYVDIFFCSADTARLTFGKTGTIEEIQKSFCEEYPISVVASTERTVITPKKHDFTSIIYSAKEDRYYSESPYNSIDVVDRIGSGDAYVSGALYGYLKHHDCQKMLEYGNAMAAIKHSVIGDMVFTDLEEIDGIIAQHKDTSGFQLEMNRMAKKVVTFGEIMLRLAPEGYYRFVQAGTYGATYGGGEANVAVSLANYGMDASFVTKLPAHEIGQAGVNALRQYGVDTSDIVRGGDRVGIYFLEKGASQRPSKVIYDRAGSSIATATTADFDWDKIFDGADWFHFTGITPALGDNVAAICLEACKAAKAKGITVSCDLNYRNKLWSKEKAGQVMGELCKYVDVCISNEEDANDVFGIKSEGTEVTAGELNKEGYKEVAQKLTDRFGFKKVAITLRTSISANDNRWAAMLYEDGQSYFSKEYLMHIVDRVGGGDSFGGGLIYACLNDYDPQSTIEFAVAASCLKHSVEGDFNMVSVDEVKKLAGGDASGRVQRMIYLKLFLNFLMIGALSFGGGYGMVSLVRETVISNGWLTESEFLNFIAVSESTPGPLAVNMATFIGSTQGGILGSFLATLGVVLPSFIIILLIAAVLKNLMKYAGVNAFLSGVRPCVIAMILATAIGMAISTLLGFTDIYSALAPDPKSILVFAILWLTHFGYKRIKKTAPSPIIMILFSAALGILLWGVMRKEWTLFFTFLKIGAFTFGGGYAMIALLENEFVERKKWIKKDDFLNMVAIAESTPGPVAINSATYIGYKIAGLFGAAAATVAVCIPSFTVIFCISLFFDQFLSLTWVSRAFRGIQVCVIYLISSAGLKMLKTIERNAFNTVILLSVIAAMLACTVFAVSFSSVYYILICGTAGLAIFFLKKLRKGNGNMNKPLILVVEDDRPVRNLIVTTLKSHDYRYLTAENGHGAIMEATSHNPDIVLLDLGLPDIDGTQVIESIRSWSNMPIIVISARSEDRDKIMALDAGADDYLTKPFSVEELLARLRVTQRRLLLLQASGDADTPIFENGELKIDYAAGCAYLKGEELHLTPIEYKLLCLLSHNVGKVLTHTYITQQIWGSSWENDIASLRVFMATLRKKLELQKDSPQYIQTHIGVGYRMLRVDMQIQTEQPKNGADEHILVCLSSSPSNARIIHTAAKMAKVLHAKFTAIYVQTDSVESEKNRLRLEQNIQLAQGLGAEIIMTHGEDVPLQISEYVRLSDVTKIVIGQSSARRRGLFGKPTLTEKLISVAPNVDIHIIPDALNYVRPHRHRLLFGAETPSLRDIGVTVLSLAVCTAIGFLFDHLDFPDTNIVTVYILGVLMVSVLTKGYLCSMAGSLLSVVLFGFFLTEPQLSFKTYAVGYPVTFAVMLVASVLTGTLASKLKDHARLSARSAFRTQVLFDTDRLLQKAKSNDDILSVTCMQLSRLLDRSIVAYTKSENGMSTGRLFAEKKYTYSENLLNAAEQKAAEWAFQNGRRTGATTAQFGQSECLYLAIRAGSRVYGVIGIPMRPEKPDSFENSIVLSVVNECALAMDNTHNAAEKERAADLAKSEQLRADLLRSISHDLRTPLCSISGNADTLLHNGNCLDETTKQQIYKDIYDDSEWLIDVVENLLYVTRLNDGRLKLELTNQLVDEVISEAVSHLKQKSVGHTVTVKCDDLILARMDAQLIVQVIVNLIDNALKYTEQGSEICVSAEKQGKYAVIRVADNGSGIPDDMKSHIFEMFYTGKSTVADSRRSFGIGLTLCKSIVELHGGTLTLRDNVPCGCVFTFTLPLSEVTLNEMAELLLIVSLLGIFAFGFYLMSRLDRFLEKNRKALLKENKFREFSEILLPQGLSDSEILSEIRRFRETHGKVDIILSDGKEDAFMKNILLIGLGRFGKHIALQLNKLGHEVMAVDSNEERINEILPIVTNAQIGDSTNTEFLKSLGIGNFDVCIVTIGGNFQNSLETTSLLKELGAKLVVSRAERDVQAKFLLRNGADEVVYPEKQVAKWASIRYTADHIRDYIEVDDSHAIFEVEVPEEWIGKTVGELDIRRKYSINIMATKENRKINMAVSPETVLTDKITLLVLGAYKELQRCFRIMLEIIHRKKRLSSFKLIALGFAGVIVLGALILMLPFSSNTGSVTPFHEALFTSTSAVCVTGLVVQDTGSYWSAFGQAVILLLIQIGGLGVVTVAATFAMLSGRKISLMQRSTMQDAISAPKVGGIVRLTRFIVRGTFLIELIGMVAMLPVFCRDHGFKGIWMAAFHSVSAFCNAGFDILGTTENKYPSLTGYVGEPTINIVIMILIIVGGIGFLTWDDICTNRWHFKKYRMQSKVILVTSVILIIVPAIFFFLFDFTGLPPGEKILASLFQSVTPRTAGFNTADLTAMTESSKAIMILLMLVGGSPGSTAGGIKTTTLAVLILNAFSVCRKKNDTEVYGRRLECSAVKSASTIAVIYFLLFFIGGIIISTAEGMPLSACLYETASAVGTVGLTLGVTPQLSVFSQFILIVLMYLGRVGGLTLIYAAISNKNQSGAKLPLEKITVGMIWFTVLRSYKDAHAKKIVQRILNGTDKDKLLETVVQLETEQQFQAIMPHDRARRKNSVTGVFFTSYFGKYVQLYAACFLAIVTKIGKKRKILIKSGFFVLKMFEIGEYIVYGVKGVCRIEDITHIDISGADKDRLYYVLAPVGDGSGRIYAPTDNQKITMRKVISREEADQLIEDMPKIEQLWVPDDRQREARYKEAMNTCDYRAWVSIVKTLYIRKQERTAQGKKITALDERYMRTAENELYSELSLTLGIPKDEMEQYIRERLTQMNKKDILELKRRFKKDACTFTRLCGCYVDADRNKVTTFGETFLNLEDEEFYKYLEIAKKVMSGTIGNNILELEFPTAEEAPGGRQQFLMGLRESALKNDDLMDTFYDLVIENYSYVGNYLILVFHDAYDVMTKTSDNNKLDESEEVYEYLLCAICPVTLTKPGLGYREDENRIGPRIRDWVVGVPDTGFVFPAFTDRSSDIHSVMFYTRDTKTPHAEFMESGLGCGTKLTATEKKLTFQSIVKEVIGEDEEESDAVFGDIQENLNNMIPVTEDETVEPEPVIVTRSAIADVLAESGVTEEQAAVIENTYENVFGEELPEAGQLVDPKLVEANGKRKEKLELVKQVENLKQQLEETRSVPVSEGDADGEDVPAVKTYDVILRVKPEKVGQIHSQVIDGQKCLVIPMDEDEHAAVNGVNTTVMPFVNRAQDIIAKKWVVCKKNGMWTREKWNVDTGEWKGTCRCRKVQVMAKLYYYYGAMGSSKTANALMTHFNYEEVGQKALLCKPAIDARDGERTVYSRIGLQHDCILLEELQQMKEEEIRGYDCIIVDEVQFATPQQVDFLSDIVDFMDVPVVCYGLRADFRNLLFPGSERLIAIADVIQELKTVCWCGRKATCNTRYNEHGIVRSGPQVMLGANDSYVALCRRHFKLGMLGPDAEAKEQCAEMESGQVYAAGNGKEYDMLETERLLLRKWTEEDADSLFEYAKDPEVGPIAGWPPHRSREESLDVIRNVLNGRECYAICEKGNPKAIGAIELILNRHNDTENHDEECELGYWLGKPFWGRGYMPEAAREMIRHGFEDLGMNTIWCGYFEGNQKSKRVQEKIGFVYHHTREKVSVPLMKEVRTEHRNIMTKERWMAEREKNCGKVMNEILVKQLAIDFCTEEGAVTSRENIFTVYTPLQGRRIFEEGECFLKIACINGKILASGKKDIIAWVRETFKDRSGAWFMDVEALHELEAGLKMFHCQIAQAHPFYIATEMSEVDTKDYEIRIFEGEELEPFRGDERFGEAFLFHELPKDEIGVGAYRDGVLLGMAGATSDSDSMWQIGINVMPEAEGLGIGSMLVAVLKNEILKRGKLPFYGTSMSHIASQRVALGAGFVPMWAELYCKSCKMENQTDDKVKLTVDEQITDMRTKNVQFEICSIEDAKKFLKYNNYYFKLKSYARNYVVNPQTKKYYNLDFAYLVELSKLDMHIRKIILEMSLDVEHYLKVRLMNDLSNNPLEDGYNIVEVFLQYNPSAQEDIKRKASTYSFCSDLAEKHLNQYNEPEKLAVWNIVELLSFGNFMELYTVYYQTYKSFNYIPYLKSIKFIRNAAAHNNCLLSSLKKPNSVKKFSKTKELANVLGKAPELRHLNREGMMKNPVIHDFVTLLFVYNDVMKVSATKNVRNKKMQEIRTLFCDDKGRMKRNKEFFEKNSYIKDAYFFVSSIIEYIDKKNHNPKHTNFLMSAKTKIVVLHMKELIYTLIFAGLGILLIFLLLFMFLPGKEDGESVETMRYVAGVYTSSIQFGEHAVDMQVIVDENRIQSVSMVNLDETVETMYPLMEPALENIADQVVEKQTTEGITYNADYQYTSVVLLNAIENALAKAELSGAETGEMSQAKVDRYKEEKKNRKKTMAKEKRLHLLAVVCGWLVVIALAGWAGVSGYRIYESKKPVETIYANVDAITDYMNSLSTEEMSLADKIFVDMCKDILENGTSTEGEKVRPHWEDGTSAYTIKKFGVVNRYDLSKEFPAITLRKTAIKTCTEEMLWIWQRKSNNIHDLNSTVWDEWADADGSIGKAYGYQLGVKHQYKEGMMDQVDRVIYDLKNNPFSRRIMTNIYVHADLHEMNLYPCAYSMTFNVTHHPGDEKLTLNAILNQRSQDVLAANNWNVCQYAVLMHMLAQVCDMKVGELVHVIADAHIYDRHVPIIRELIEREQHPAPKFTLNPDVKDFYQFTTKDITIEDYVTGPQIKNIPIAVMNLIAAVDQNWAIGNKNELLVRIPADQKFFRETTTGKVVVMGRKTLESFPNGLPLKNRTNIVLTHDHTYKVPGAVVVHDMDELHEELKKYDSQDIYVIGGETIYRQLLDECDVAHITKIDYAYDADAYFPNLDERPEWKITADSEEQTYFDLEYYFYRYERVKMENFIYSVDATFPIFLVMVIGYILKQIGMLNDNFVTVANRFNFKVTLPFMLFRDISGVDIRAVFDIRYVLFCALVSTACFWIIWGGVKLFLKDQSMRGAFVQASFRSSAAVMGLAFIQNMYGSSAMGPLMIVSAVPLYNIFSVIVLTFEGAHSGEVDPKQKIKAACINIAKNPIILGILAGLIVGLLGIDFPVIVDKTVNSVAQMATPLALITIGAGFEGRKALAKIRPTIVASMIKLVIQPLIFLPVAAWMGFRGEQMIAILIMLASPTTPSCYIMAKNMDNDGVLTASVIVMTTLLAAFTLTGWIFILKTVGLIGMDITGRKLFVKALQEEGVTTLFGYPGGTVTDLFDELYKQDGIEVVLPRHEQGLIHEAEGYARSTGKVGVCLVTSGPGATNIMTGLADAHYDSIPLVCFTGQVPLSLIGNDAFQEVDIVGMTRSITKYGVTVRKREDLGRIIKMAFYIASTGKPGPVLIDIPKDIQTAPGPAEYPSSVQIRGYKPNESVHVGQLKKAYKLLRAAKKPLILAGGGINIAHANDKLLQFAEKMQIPVVTTIMGKGAIPTGHPLYVGNSGMHGKYAANMAVSKCDVLFSIGTRFNDRITGDLNEFAPKAKIVHIDVDTAAISRNVVVDVPIVSDANLALEKLLEWAESKDTAAWQAQIAGWDEKNPLEMRRDHGMTPQMIFEHVNRTFGEAVYVTDVGQHQMWATQYLELDSWHQLITSGGLGTMGFGLPAAIGAKIGNPDKEVVCFSGDGGLQMNIQEMATAVVQEAPVIICVFNNYYLGMVRQMQQLFYGKRYEATCLRRRKGCPANCKGPNASCPPYTPDFIALAKSYGAHGIRVEREEDIQAALDEARTYKDAPTIIEFMIATDEIVLPMVKSGNPMSEMILKMKNRWIALYVENQVGVLAKVSGLFSGKSYNLQSLTVGTTEDETVSRMTICVTSDDITFEQIKKQLNRMVEVIKVIDLTDVPIHMKEILFAKVLGINAAEKLEVFQIAQVFHVEVSDVGNDSVLLECKLTERRNNELIALLRSKFKRIEVVRGGAVAIESISTSCRMPDQFEHYITKNIKAFYKRRLLTPILYLIFLLVLWFVLSLSAPLFPDTLDAPDTLESTYRRHEEYISATLSNLKFTGYTQSFLGHISGYYYYTMRNDECIIVLLSPNTSEQGLPEIPQVSVRAKILHGSENFDELLNHLASDLNWTENGIHNKVSQYVLSEPDYNLLGNTLLYVVFFATGGYALICIVFFILYICFPILSPACQDLALFGNPKKLLEQAEDELATLPQLATEDMFITEHFFIETSVYGNAIVPIDEIIWIYKYSTLHKFFWYHFSISYTLHISANRHLYIQCPKNIKSDIDGIMDYLAEANHNILVGFSEANRLKVQEIQGTPMHFEKFIAFLKKRVMGAYESFARVYDLFMDNVPYEEWGSYLTGLLREYGICGGTVAELGCGTGKMTRLLAAAGYDMIGVDNSEEMLEIAREAEYEADAWDESEESDEPAGRGILYLLEDMRELELYGSVCAVVSVCDSMNYILEEADLREVFSRVHEYLEEDGIFIFDLNTVYKYRDLLGETTIAENREEGSFIWENYFDEESAVNEYDLTLYIREDGETYRRFEEVHYQRAYDLKTIGRLLADAGMELTAAYDAFTKEPVRDDSERIYVVARPRRMSQDRDYIVRATAAEGSIRAFAITSRHLVEEARVDHDTSPVITAALGRLLSGAAMMGTMMKGEKDLLTIQIQCGGPAKGFTVTADANGHVKGFPNVPDVELPLNAQGKLDVGGALGLGVMSVIKDMGLKEPYVGQIALQTGEIAEDLTYYFATSEQVPSAVGLGVLVNPDRSVRQAGGFIIQLMPFTPDDVVDRLEKKITEIASVTEMLEDGKTPEEILELILGEFGLEINDTVDAAFQCDCSKERVSRAIATLSRKDLDDIVSDGESIEVKCQFCNKAYHFDIDELKEMRKMRDGFVKVAAVTPKIRVADTTYNAGVIVEGIREAAVAGAKVIVLPELVITGYTCSDLFLQEYLLEQAKRALGTIAEETAEVDAILFVGLPLAYNGKLYNVAAVLCRGEVLGFVPKTYLPNYNEFYEARHFARGMADPVEVDFEGECVPMGTRLLFVCTSLPELKIGAELCEDLWTPEPPSIRHARNGATLLVNLSASDETTGKDIYRRELVNGQSARLLCGYIYASAGDGESTQDVVYSGHNVIAENGHILKESERFGSGVICTEIDVKRIEAERRRMTTFEMAEDGYVEVRFSLETEETALTRFIDPMPFVPGNEADRIRRCDEILAIQAAGLKKRLEHTHCKTAVVGISGGLDSTLALLVTVRAFDLLGIPHDRIKAVTMPGFGTTDRTYDNAVSLIRCLGADFTEVDIKEAVNVHFRDIGQDPAVHDVTYENGQARERTQILMDIANKEGGMVIGTGDLSELALGWATYNGDHMSMYAVNASVPKTLVRHLVRYYADTCGDEKLGAVLTDVLDTPVSPELLPPEDGKISQKTEDLVGPYELHDFYLYHMLRLGFAPKKVYRLAKVAFDGVYDDETILKWLKTFYRRFFAQQFKRSCLPDGPKVGSVAVSPRGDLRMPSDACAAVWLQQLEEIGMIMQYRKDKNGNEISVLGYGCMRFTKEGGHADIDKAEKEVMAAIDAGVNYLDTAYVYAGNEAAVGEILARNHCRERIYLATKLPHYLIKSVEGAQKMFEEELRRLQTDYIDYYLMHMLTDLPTWEKLKKLGMEDWIREKKASGEIRNIGFSYHGRSDMFMQLIDAYDWDFCQIQYNYMDEHSQAGVDGLRYAHARGIPVIIMEPLRGGRLVNLLPESAKELFAQDEEHRTPAELALKWLYDQPEVTCVLSGMNSMEMVEQNVRTASEYGVGCMTESDRALVEAVRQEITKHVKVGCTGCGYCMPCPRGVDIPGTFRCYNAMYSEGKKSGRRDYLQCTAFRKNPASASQCVGCGKCEQHCPQHIEIRGELKAAAGELETVKYKFMKTAIGVLKLWMKMKFGIKEVVATGIGTALFVALTEVQIPLGFIPNTALQPRAALLAFLAAVFGPVVGGIVGLLGHAIGDALFYGSVWWSWVFPDAVFGILVGLFAAKYAIKNGGFEKKQIVLFNVVQVVANLAAWVIVAPVLDIVIYAEPANKVFAQGAWACLGNVIIIGILGTLIAAGYSKIGAKSSSLSKEDMEPIIEFQNFSFKYRSQKEPTLKDINLAIYPGEKVLIVGPSGSGKSTLAHCINGLVPFSYAGDITGTYRIKGEDPAKLGIFGLSKSVGTVLQDTDGQFIGLTVAEDIAFALENDRVEYHEMRGRVDKAADAVDVKDLLDHAPGALSGGQKQRVSMAGVLVCDVDILLFDEPLANLDPATGKRTIALIDELQKAKGATILIIEHRLEDALYRDVDRIIVVGEGKIVADTTPDELLAANVLAEEGIREPLYITALKHAGCEIRPETHPAHVETMELSGYKEALCRWNEKVALPEKKPGDDVILSVENLAFSYDGRTPILTDIHMQVQKGEMLAIVGKNGAGKSTLSNLICGFLKPGQGRILFGGEDIADWSIKERGEKIGLVMQNPNQMISKPMIYDEVALGLAVRGVPEEEIKERVYATLKICGLYQFRNWPVSALSFGQKKRVTIASILVLHPQVLILDEPTAGQDYRHYTEIMEFLKKLNEEYGITIIMITHDMHLMLEYTNRAVVIADGRLLADTAPAAVLTDDAVADRAYLKKTSLYDLAVRCGIAEPTQFVERFIGYERQMRAAEREEEAMSRVLSYEEKDTWIHRLSGVTKLLFFLLWSITSMISYDTRVLLVMLVCSLIIFAMSKTKWKQVGTVFKFIMFFLVINLIAIFFFSPGQGTKIYGTETPIVHLFGHYTLTKEQLFYEFNVMVKYLTVIPAVFMFIVATNPSELAASLNRVGVSYKIGYSVAIALRYIPDVQDDFAKIKHAQEARGIEMSGKAKLGDRIKNVAAIIFPLVFSSMDRIDVVSNAMELRGFGKHKKRTWYMGKPLAAADYAVLIVTAAFSAVALMITFSNGSRFYNPFVMEALKQSIREKGKMVVAFSGGVDSTFLLKVAHDVLGDGAVAVTARSCSFPERELREAKAFCEKEHIKHIVVESEELQIEGFSHNPTNRCYLCKKELFTKIWDIAKEYDIPYVAEASNLDDNGDYRPGLMAVAELSVLSPLREAGMNKSMIRELSHGLGLPTWNKQSFACLSSRFVYGEEITEERLGMVDRAEQLLLDAGFHQVRVRIHESGTNTIARIEIGTEDFAKMFADDFYQKVNAACKEIGFTYVTLDLGGYRMGSMNDGIRKAMNWEVISQYLPLYQKAMWLTLRIGWMGIAFSIIIGLICALIVHYKIPVARQIVKIYIELFRNTPLLVQLFFIYFGLPKVGLSISADVCGVAGLALLGGSYMAEAFRSGLEAIEPIQMESALSLGMTKKQAVLYVILPQAVSISVPAFVANVIFLLKETSVFSAISLMDLMFTAKDLIGLYYKTAECLFLLVVFYLIILLPVSILGTLLERRLRYAGFGNMPDLGISVLFKGKNMIRLLGGLWVALRISLISVVISIPLGILLGIVMTWKNPVTKAVTRVYLEIVRIMPQMVLLFLVFFGTTRMFGWNLSAEFASVIVFTFWGTAEMGDLVRGALISIPKHQYESGAALGMTRSQIYFYIIIPQTLRRLIPLSINLVTRMIKTTSLVMMIGVVEVLKVTQQIIEANRMASPNAAFGLYGTVFVLYFLACWPISMLAGHLEKKWSNMKAEAEELLKIEHIKKSYEGNEILKDLSLTIHKGEVVVIIGPSGCGKSTLLRCINALEPIQEGSITLRGETIDGKAKNIAGIRQKVGMVFQSYELFPHKTILENVILAPLKVQKRTKEDAVSEAKQLLEKVGILDKCDSFPRQLSGGQKQRVAIVRALMMHPEIMLFDEVTAALDPEMVREVLDTMLELAKAGSTMVIVTHEMSFARAVADRVVFIDQGEIVEEGKPDEFFTHPTTERAKKFLHTFEFEAVRDMKKERLTKRLALFTALTLTGAMLAGCGNTDAAESSSDAQTGVTADTQAAAGDASADVVYRTLDEIKESGTINIGVFSDKNPFGYVDENGEYQGYDVYFANRLAEDLGVDVNFVSTEAASRIEYLQTGKVDVILANFTVTPERAEEVDFALPYMNVSLGVISPDSAVVESLDDLTADDPVIVISGTTAETYLTENYPDLTLQKYDSYAAAKTALENGSGVAWANDNTEVIAFALQNPGYTVGIPELGSTDTIAPAVSKGNTTVLDWINEEIKALGEENFFHADYEATLADTYGSDYEDTLVVEGGETKMEKKNRNGRKVMAAFLTVSLAVGILGGCGQTAADTADAKEVEITNVSYDPTRELYEAYNALFAEHWKEQIGQDVSVIQMVTLALEGDVQVVADAGLIEDGFADEFEQESSPYTSTIVFLVRKGNPKSIEDWDDLLREDVGVITPNPKTSGGARWNYLAAWYYFESQGQSEEEITENMKTLYHNVLVLDSGARGATTTFAENGQGDVLIAWENEAFLSLEEHPGEYEIVVPSVSILCQPTVALVDEVVDDRGTREVATEYLEYLYSTEAQKLEAENFYRPSDPDVFSDYISTSGERVITELPADGKWIVDDIALTDIAHFGGWSEASAKHFADGGVFDAIYEQMEKKLIYMDNAATTPVKPEVLDAMLPYFTEKFGNPSSIYSISSENKKAITDAREVIAKTINTTPENIYFTAGGSESDNWALKATADVYASKGKHIITTKIEHHAILHTCEYLETKGFEITYLDVDENGLVKLDELTAAIRPDTILISVMFANNEIGTIEPIAEIGKIAHEHGVLFHTDAVQAYTQVPIDVEAMNIDMMSTSGHKINGPKGIGFLYIRKGVKIKSFIHGGAQERHRRAGTENVTGIIGLAKAAEIATANMKERTAEEIKVRDHLIERIEKEIPYAKLNGDRVKRLPNNVNFSFQFVEGESMLILLDSKGICASSGSACTSGSLDPSHVLLAIGLPHEIAHGSLRLTISDQITMEDADYVVDNLKEIVNHLREMSPLYEDFIKKNKMYSEKVMDHFQHPRNVGEIEDASGVGTVGNAKCGDIMRMYLDIDENQVIRDCKFKTFGCGAAVATSSMATELVKGKTIYEALQITNKAVMEALDGLPPVKVHCSLLAEEAIHAALWDYAEKHNIKIEGLEKPKNDISEGLEEEDYMNRQDEADYTALKEYLCDMILEEQLKLGYERETIRFYSPSSSIGHVLKLSDRSKPAVLAALEGFGAYAADTLGEVAVSGASGGRICFLIPAAGAEYVHAHGVAHPFLKDLIDCFGRHDVTREQVWELFRHYSKSARIIEIKSDEFDDVCYFEDGNPDSYLYCVKFDEGHAFYHRFLKEDFEELFGEASRMKGARMKITTKGRYAIHILYDLAVNGTEHPVSVKEMATRQEISVKYTEQIISILNKAGYVSSSRGFQGGYRLTKPLDEYVIGDILRLTEGSLAPVECLANAENPCPKQQKCATIMLWEKVDKAIRDVVDHVTLQDLLDWQKQERCMKISTKGRYALRLMLDLAMNGENNVVRIKDIAERQQISDKYLEQIISVLNKAGYVRSTRGPQGGYSLRKAPEEYTVGDILRLTEGSLAPVACVEEEGSCEREVDCVTVEVWKRLNQAISDVVDHITLADLVALQEEKREKSGLDFGKDIMSIDQSKIRNFCIIAHIDHGKSTLADRIIEKTGTLTSREMQAQVLDNMDLERERGITIKSQAVRIIYKANDGEEYIFNLIDTPGHVDFNYEVSRSLAACDGAILVVDAAQGVEAQTLANVYLALDHDLDVMPVINKVDLPSAQPDEVVKEIEDVIGIEAEDAPRISAKTGLNVDQVLEQIVQKIPAPAGDPKAPLQALIFDALYDSYKGVIVFCRIKEGTVRVGDPILMMATGAQSEVTEVGYFGAGQFIPCDELSAGMVGYICASIKNVRDTRVGDTVTNAAHPCEEPLPGYKKVNPMVYCGMYPADSAKYPDLRDALEKLQINDASLQYEPETSLALGFGFRCGFLGLLHLEIVQERLEREFHLDLVTTAPGVIYKVHKTNGEVIDLTNPSNLPDPSEIEYMEEPVVSAEIMVTSEYVGAIMTLCQERRGVYNGMEYLEETRALIKYDLPLNEIIYDFFDALKSRSRGYASFDYELKGYERSELVKLDILINKEQVDALSFIVFKDSAYDRGRKMCEKLKEEIPRHLFEIPIQAAVGGKVIARETVKALRKDVLAKCYGGDISRKKKLLEKQKEGKKRMRQVGNVEIPQEAFMSVLKLDEDMELYIHIPFCVKKCQYCDFLSFAADEATQAAYVEALLREIAYYGPHCSDYLVSTVYIGGGTPSWLTEEWMAQIMSAVRRSFRLASDAEISIECNPGTVTDHKFAGYRNAGINRISIGLQSAVDEELKILGRIHTFDQFLKTYELARKNGFDNVNVDIMSSLPGQTAESFARTLQQLLWLKPEHISAYSLIIEKGTPFYDLYKFDAVKQQAGMQTVALPTEDEVYRMTKLTEQVLAEAGYVHYEVSNFAKPGYACRHNIGYWERENYLGLGLGASSLMENIRYSNTRELYVYLEETRHIREGIWENEITDSQGSGASGRVEQLPATNLHASAERITRKGQMEEFMFLGLRMMEGISRERFAQTFGTQIEAVYQEVLLHLTEEGLLEKRAGRIYLTERGQDVSNYALAQFLLMNVTKRQKRRIRNLVCIQYSIVKMLLVIAGFELLGRGLSLMQGTQSATQEIEGEVIWSEETKTEENPLIVCVDAGHGGKDNGSDYKGRYEKDDNLKLAQAVSAYLADKNVKVVMTRSDDTFLRLSERCGIANQSGADYMLSLHRNDGEGNGVETWISASGSEETDALANHIMEVLDTAGIQRNRGVKKGTQTGESSNYYINVHSDMPSCIVEMGFINDASDNQLFDEKLDAYAAAIGDAVLATAETYRANKVTDGNGQGAGEAGSGTGDGQGTDGTGDGAGDDQGTDGTGNDTGDGQRADQTGSSTGDGQSAAGGNAAVQTIALDGLDTTVQSWGLGSHTDADNRPNDAVSAQQKYGDYHALFIGENTKTLYLTFDEGYEYGYTESILDTLKEKGVHAVFFVTEPYAKAEPALVQRMIDEGHVVGNHSVTHPSAGIPSLTVEQQQEEVMGNHQYIKDTFGYEMNLFRYPAGKFSEQSLAVVNNCGYESVFWSFAYLDYDVDNQPDQAESLQKMKNKMHPGAIYLLHAESATNAAVLGDLIDAAQTQGYSFGTLMEKLHKRNLIIVWCSVVALSLVSLMGYGFTVLAIRGIAILVVAGIISTIGCYLSIDDVKKVLILVFPPAIGTLLYSWVYGGNSIPYLANFVLLAMTTSYFMESVIIYFAVPFTVISVVFMIFSPETIAGSDYSMAGVVTRVFLFIVTAILLYFATKRGAGVVKKTEETLSIVQNNAKVANTISTNLNTTIHKSMSSVHALADGSSSVKSAASQMGQVVEDTANATVSVMDKINAATTEINRNHELAVSLDQGFQKVQSAVEKGNGAIQTAKSSILSMEETVDSARKSTDSLLTEMNRITSILGEINSIASQTNLLSLNASIEAARAGEHGRGFAVVADEIRALSEESAKAANNIQEILTWLTDTTGQISKEITAGTDAASASVELVGGLMDYFSNINDATDEASQIVDEEYKIIEHVKEHFGNIQQEIETLVATSEENSATIQNITDTITSQNDSIRSISAEIDEISSLSADLEQHFGEDNMKLRFQKDGTFKIMQITDMQEIPAISKDTIALMERAVLEEQPDLVVYTGDQIKGYGVTYKGKGEELEREVAQTIGKLLEPVTKRGIPFAVTFGNHDCQVGISNQDQFYHIYKRLPNCIGEQAEGIDGGGTCAIPIEASDGSGRDVFELYLFDSGTDAREGGYEAFDPKIIAWYRKQREDLREKNGMYVPSIVFQHIPMREYYEVLKRVDRGEKGAVRAYRTHKNEYYKLGETCGAGDIFLEPPSVPDVNTGEIEPQDYFMALYAVMVLFTIFANGWIGSAMTTWARENGWTGNLCDMVIKVIGMLIPMLWTYPCNRFLIHRKRKDCELFHKKYNERSMETRIALIGIIVESTESVEQLNHLLHEYGSHIIGRMGIPYREKNVHIISVAIDAPQDVINALSGKIGRLAGITAKTVYSNVMTHEEKIIERLKTEQKLSAEELDCLLTTEDTEAVERLRAEARTAAQAVYGKQIYIRGLIEFTNYCKNDCYYCGIRRGNACAERYRLTKEQILSCCAAGYELGFRTFVLQGGEDPYFTDERICDLVSAIKRAYPDCAVTLSIGEKERASYQAYFDAGADRYLLRHETADTVHYGKLHPEEMSLKNRMRCLRDLKEIGYQTGCGFMVGSPYQTTETLYEDLVFIKELGPAMVGIGPFIPQKDTPFGGETAGTLEMTLRLLSILRLMNPHVLLPATTALGTIHPQGREMGILSGANVVMPNLSPVSVREKYKLYDNKICTGDEAAECRFCMQRRMENIGYEVVTDRGDYRPAVMKWLPTAGITDLRFKIKTLTGKHELTGKKGKIMYKYDAKSLKAEEFINDEEIRETLAYADANKDNVELIDAIIAKARERKGLNHREASVLLACQIPEKIEEVYALAQQIKKDFYGNRIVLFAPLYLSNYCVNGCVYCPYHLKNKHIARKKLTQEEIVREVTALQDMGHKRLAIEAGEDPVNNPIEYILECIQTIYSIKHKNGAIRRVNVNIAATTVENYRKLKEAGIGTYILFQETYHKESYENLHPTGPKHDYAYHTEAMDRAMEGGIDDVGLGVLFGLEMYRYEFAGLLMHAEHLEAVHGVGPHTISVPRVKHADDIDPTAFDNGISDDIFAKICALIRISVPYTGMIISTRESQAVREKVLPLGVSQISGASRTSVGGYAEPEPEEENSEQFDVSDQRTLDEVVNWLMKMGYIPSFCTACYREGRTGDRFMALCKNMQILNCCHPNALMTLKEYLEDYAGEETKKIGMELIDRELEKIPNPKVKQTAYEHIHDIAEGKRDFRFMAVTLNETPGSSRLHIGIFGKTNSGKSALINAFTRQEVSIVANVAGTTTDPVYKAMEVHPLGPCIIIDTAGFGDESELGKSRMEKTRLAAEKTDIALLLVAGNGDAALDEEEMHWYRFLKEHGTPVLFVVGKTDIRSDAQVDKLAVAIRGKTGEEAYPVSAKTGEGMEALKEALIRKLPENYGSRLITGTLVDREDLVLLVMPQDIQAPKGRLILPQVQTLRELLDKKCLVMSVTTDQLIPALAVLKKAPKLIITDSQVFGYVYENKPAESMLTSFSVLFAAYKGDLPYYVEGARHIDALNAHSRVLIAECCTHAPLKEDIGREKIPRMLRKRFGDSLAVDIVSGTDFPEDLSGYDLIIQCGACMFNRKYVMSRIERARGQGVPMTNYGVTIAHLTGILDKISMPEAMRYTTTDELEHFSFAEAYIADVQLAGGFFHMTLSNVTILPENSCNRDIREMRANDLVLKIKEPVIRSLVREGYKVYDANGALLRTCEDEVIDQAAWNETIRSFADGTLYALKQDGENYIFEIDAPDEEEYVLAVSGTHNTASWDRFLNKMSRIITIGREFGSGGREIGKRLSDELGIAYYDNEIISQIADRTKLAEGYVQHVMENGPSTLYPITIGRSFYMGVDPIMEQNNAIYREQSRLIQEFAEKSDCVIVGRSADYILREKHPFRLFVYAEMEHKMERCKKRAPESEHFTDKELKRHILDVDKRRARYYQFFTGQTWGDRLNYDLCINTSNYDIKELVHAIAHLVEAMALLQHAVAVAREYLWGFPMLALLFGTHLYFTFHLGFIQKKIPLGIRLSLIGTKNQEKDQVTPYSALATALAATIGTGNIVGISTAIAIGGPGAVFWCWLTGVFGIATCYAECYLSIRYRVRRADNTFAGGPMYILDRRLKKRKLAAAFAVCTLLASFGIGSSVQSYSIRTALQHQITVSPHLVGMAVGVLAGIIIIGGNSQIAKVCMWLVPLMSAFYVGGCLYIIGRNRAVLPETLALIFSSAVCPKAVAGGCTGGALLLGIQTGVSRGLFTNEAGLGSIPMVAATAASSSDSPKEAAVRQALISMTGPFWDTVVLCAITGIAAVGSMVSHPQEYRGVAPENMCFVAFRELPVGGEWMLSISLTLFAFATIIGWNVYGTCAVRYLWGEAGVRVYQVAYMFFAYLGAVLSMELVWGISDLLNSLMALPNLLCLWMLRGEIATDCGKGTDKTSKKKMEKKEQKHLYADTVEQNKRVNHFLAIGYIVFYLCVLCVVGIACLRGIRTVGYTVMIAVLIILATAGTLVLYQRRKDDPKIRYIATVGLLVITFVMGWAFDNYYVRFMAAIPLVACILFYDKKFAAFSGIAVSAVNLLVTASKTLALHTYQGENALDQWCATLAIILMMVVVYLTVSVAYQFNRDTIGSLTEKEAAQRQMVDDIIAVADQVRKGTENAMNIVNELNSSTEVVNGAMKDISDSTQSTAENIQTQTEMTQNIQDSIGTTLERSEKMVQVAKQSGELNEKSSRIMDDLKKQSAVIAQTNSEVASSMRELQDRTSAVKSIADTIFSISSQTNLLALNASIESARAGEAGRGFAVVADEIRQLAEKTRQETENIANILEQLSENAQTAADAVERSVTAAGAQDEMIAQASESFGAMNQNVNELVTDIGEIDTMLNNLSKANNQIVENIMQLSATTEEVTASSVQAADLSVKNLGNAENTKDLLHSVLDESHKLEQYIHMYLVQFIRGFCMALADSVPGVSGGTVAFLLGFYDQFIDSIDDLITGSREKKKAALFFLIKLGTGWVCGMILAILILASVFDAHIYAISSLFIGFIIFAIPIIFREEKNCLAAKKSAIPFVLIGVAIVTAITYFNPSSGGEGVSLEHLTPGLALFVFLAGMIAICAMVLPGISGSTLLLIMGLYLPVVTAIKDILHLNFAAFPTVFIFGCGVLVGIFGVVKLIRKALDHFRAQTIYLIIGLMLGSIYAVVMGPTTLEVPQPAMTLHDFNILFFVIGGALIIGLQKMKDLKAMKKLLQYLGNYKKESILGPLFKLLEASFELIVPLVMAAIIDTGVANADRPYIMKMSLVLFLLALIGLTCAITAQYFAAKAAVGCATGLRHALFEHIETLSFTEMDTVGTSTLITRMTSDVNQVQNGVNLVLRLFLRSPFIVFGAMVMAFTIDVKAALVFVVTIPLLSVVVFGIMLVSIPLYKKVQAALDKVLGITRENLTGSRVIRAFNKEQDEIAQFHEDNEALTKIQLYVGKISALMNPLTYIIINGAIVVLVWVGAIRVDNGNITQGQVVALVSYMSQILVELIKLANLIININKSIACMNRIETVLDMESSITEHPVAETGSLTSDGAGREGKETIPAENAVVFSKVGLTYAGASEEALSDIDFTVRRGETIGIIGGTGSGKSSVVNLIPRFYDATRGEVLVDGKNVRDYTLEELRAKVGVVLQKAVLFKGTIRENLSWGNSDATDEEMYEALETAQAREFVDAKEGGLSYEIEQGGRNLSGGQRQRLTIARALVKKPQILIMDDSASALDFATDAALRKAIAHMDGQMTVFIVSQRAASIMQADKIVVLDDGEIVGLGTHEDLLKDCEVYREIYESQFKRTEEQQAGEAKRMKKVVNENQKSTLRKVLRYIRRYWGYLGASIILAAVTVALTLYLPILIGQAVDRIVGKGAVDFAGIFVILRKMAVIIGLTAVAQWVMNACNNKITYNVIRDIRTEAFEKIEKLPLKYLDAHSYGEIVSRVIADVDQFADGLLMGFTQFFTGIVTIFGTLIFMLTISVRITVAVVVITPVSLFVASFIAKKTFSMFKLQSETRGEQTAFIEEMVGNQKVVQAFSHEDEALEKFDEINERLQKYSLRAIFFSSITNPSTRFVNSLVYATVGVVGAFTAIAGGISVGQLSSLLSYANQYTKPFNEISGVITELQNALACAGRVIELIEEDAEVPDAEDAVDLEHANGKVELSHVYFSYVPEQKLIEDFNLSVKPGQRVAIVGPTGCGKTTLINLLMRFYDVNSGTIKVSDIPLQQLTRKSLRDNYGMVLQETWLRSGSIRDNIAMGKPDATDEEIIAAAKASHAHGFIKRLPEGYDTVIAEDGGNLSQGQKQLLCIARVMLCLPPMLILDEATSSIDTRTEIKIQNAFAKMMQGRTSFIVAHRLSTIREADIILVMKDGSIIEQGNHEELLEKNGFYAKLYNSQFAKTSMKVKKEVIATSQQTQKMERGRYREDIFLFCFLKLVKVVEPCGTPIATYRINYETRQAINEYVDAHGFGNSREAGALQQLYELYLAPNRARSMYYKQITVYVVDTAAVDVKPDGTTRFISEKYYEKSYEQGGFEDNSVWKTDPEYVAALRTAFDNLKNDTPIATYRINYETRQAINEYVDAHGFGMTERKIALSIEEAADYTGIGRNTLRKLVEWKKLPVLKVGRKVLIKTDILEKFMEANEGRDLRDKGNVKAVTRNVATMLLLICNRELLFIGKRKDEDDMAKSTKTYEERIRALEKKEQESIEATKKLIAQRKELEKRKKAEESKKRTHRLCQIGGAVESVLGCPIEEEDLPKLIGFLKRQETMCVIWSFDDMGLGEQVILSDKESKGGYYEMSNTINVNYMTRAYNQYQQKNAAKDQEKEDTRFADSVREKSEASGSIVGNSKIGSVSAKDMTMVEYKQYIYNKISQIPMHPTRAGESISVTISEAGFEAMKNDPEYEAWVLNDLQVGWSQPDKWSGICGGAFSTIYYGASKEECHAEMWSAGYNNGNGGKIFNDKSKNSFWERRIENKKRIENQVKKQQEKKRIQKKQAERTAYEEYAQNKRLSAQDARTRLVAESSSSAKTVTISQAVASYETNFTMAVSVSNKTQMGINGVSSYANTYTYGNVKNENVKPSKNSEKNYYAGYTMNSANKFKNVSDYSKYLTNKYKCLTPCKNASVLIDRSVMQKACGDEKTAKWLEENLAIMPDVIRNAQKAAISHGSKLISVEFKFTNNGTEMTTCGIFGETGTDSEIDKWLERMKEDKEKEDKKTENMIAIEATTKNKVGFDTYAMKKEKITNKVLKVVERIARNEVEKTVLGRTAECSAIYHQPKRPKKRENMKIQLNPGGNLTYQYYASDIREILAYNRTQHKDIMSELNVQFVIADGTIQINMHIGFGQNTVSSLYGHQKGDHMKTIELSHKKHKANESQEKMTVTSGKDVCRRIGHSDEADGENQENAYIHDRFALDAGYANYIRETVPKTTWSKDYLQELWDEETKYLKSIRESKNGYGFDDIGMGAAYAYSTMYQKIVEGYRNGTREVYVCDNPESGKRRLLSMDEELEKLNKGFEELIKWDKMVAKSQKQNAENKQKFQNTKLDESFDAFDINQACDYIQDSYLEFRSLYLEQYERTGGNIDIKSLFSYVLRSGNQDMHKYCEFLFEKIGFIVMAVAKQQSEAWRKALDGVPDSLRMLLEINNTENVPEYSEKQKKQYNDAIKAYDHTGNGVSWSQFEWKTYDTQMTVTFEDSVKVESISKNGKFKCIMEPYPGNELDFMSITKVGSSYNFIYNTKTGKLSTKDGSKNEFVDFCNGDVKGEDTETLNHFDEHTRYQFTRMLFAYGTGMTGQNPFANDEKVEITADIDSATHTSFYVNGQKAFTAITGMSYLPSEIQTFGTVQQPFKTRGYKPYDPSTNSITIGVGSRFNLGNGYSMTVQEDFVWGEGYGNGSKADDERCNMMIGGLSSLIHFADQQYFSSMTDTYTDYILDFLASQGVDTSREFVINGTHCELVNGKIREVGNDYVVPSSIQQKAVKRYEESMSQLLNSGTWYRWSMEINNTGSTYGAAFRQKPIFFMSGKETVAFFEGKLKKNMTLQEDSCTLGSNDTYRRQHTTYEVSDKKKGSTFLDLDFLIKDETSSLKGNLSDKKDVDFYNFSIPFNRTIQNYFGVQIYMDMPEGCDYDLTLYDEYGNQVGKAEWDGEGRKTLTIPNWDTNTNKYCIKIENKNGEEVSPHDYYKISFKVTENKEQEKTDAIREAFGNLHGAYSRKDENWREYLDKYNEVLMDTEKNYTKEMEKLHQKQFESLPEEKQYKGGRTVDELLQDMAEGKTLDDAETEYVKIFANLKDFEKAQQKAELKNDFSEDFVKDLESKGISRDELEGMQIKIESNGNVTVSGIEDKEVREQVQKLVEEKYSDRMYQYYTGIADSVGNLSSNTYQYATDVQEVRRYLKGVTGEDISLENLYLTPDGKIGGLPEKAANLINKTKDNAKIERIKDALINIIGHNRISGDLGIPDFTSEFQFSNGAFSVADSGFTVDMAALDRRLTPQPHDNMYSDMYEYSFRKVLMVITRTVEMHAQLVGYDFKKKGLPTDKNIAVENSKVSNDYFWKTNKYTDQDVFGRTLDLTALINKPDGYLKGSLSDTEDVDYYEFNITEYRALSFVKDTYNRDITITLDHIPEGYDYEMVLYDEEGNQVGIGKENGNGGLSITIPNWNSDNTGYTVKVQAKNGSTVNPDAEYHLSFQTTQADKSHGAYQEMAEVQKYAGTVRKQMQEGLIDTEEMRAIKEIRQKYKTYYTEQMEKLHQEQAEAVMQGGAVPDDEQIHNLLEKKAAGKELTEQENALLNIFCTATELDSANASAKMNTTVKDRISVDLQEAGMDISDSTFSIKIGADGQVSVDGINDNAMKQKIEDVLSKYSDDLMDIYFSMDSEIQALSDKEKYLLQAAVDVEKFLYKATGGSVSLGDLSVENATIHGLPKTLDDLLNNPGDNLTYQDYASDIREILAYNRTQHKDIMSELNVQFVIADGTFQIKDMRIENGYLQQSMLCSKNNRNAVGNFSDTMNKAQECISNKISTRDSYVNSTDYSNFGIYTQNSISQDIELPIETERYKIEDATYVNGVAAYEIVDKQTGKDFYIREDQLAIQRDEKTGMEFLINMDQPFSYNVTMTSELKNLLNDLSDKRNIDIKEIPLQGGLVVKRDPKTGLNYLSIKGNEAQGVSVIITSDKDIETLNKLADEFQKYPVSSQRFTAGLYALLEISGNLKREKDGFTFLTPNGVTYIPYDGDSSKAWEIDMPGSCYATARKCLAAENDCADISAWTKNLKGIKIYYGDNYGTTQENNVYKVDDLGRYYMFAMNIDYSQFYRGTTNIPSYGNGIYKKDTLVKYEFNTTDEHGNKIMDKMSREETLQAMKDIGSQYGDAVIVEFSGDGMAALVENKKGIVDANVTQEQRESMEARNAAFQKEITQVDNSLELPAYSGMYGADKAVASAVENCSKEEQGFVYDIIRQNFLVGNTGSMTEEERQANISLGMKKAEYAAENFIPEDSRKPFLEAMESIAKLASAGKADNNGNMDYGVGKGTYLGHGSNLVKTTNALDMMRTMDGSAYTEYQKISKESSNEDRQLNALKYLTNWYEGAVKKNPSMVDNYEKQSEEYVEKNVKDQKLDATFSDIKTENKAAFFESLKVFQNNNPNFLSSIINRELASKFWSIMIKTKNISEMLTSLIEEYRFNKNTLSKYLEITEETVDMGNVECLPDDPALRLKILSKAGFLYFGAIEDKDRQLSGFLEVLVSYHGISKLTIAKMAGVEENDIDRLLANPPEKDEIEVKYKIAVTVMELRFWLKDCESPIMKNKSINQVSIINGEDGPTSVFIFGEAQKQSLKIRIRNAIYQSRRKRIEKRIAVNPHTLAEVVQYAKDHYDLVEINPAATNWIERQKNLKASLIMQHKPELLGQRKDIPKPDFHNEESVKNFLNEMEIRNKLIDQMPDNVIPMDFHLYEIKIGEDLMEIEVDYTWNIFGISYSGNKSVIKRFKKIARDLYCYYGVSEEDIKNRTKRYSSLVTELSSMNVNINNKNLFSQSLLINKFFFQKNSSHKQTGITTVDSGCQYRNNNYYYNKDGVPFLSKEQADRCINGKDWKKIVSVSDKVKSDLEKVVKQDFISSNGAYIPEESKRHDVIKQYLNTIPSEQRNSASWTLSRMAGDYASRMETLVKKNNPGWKPGDAFDTSILDQMDDTLGGLDFKVMAVTGIGTYASYTNRYGNTQNAGNKTGRTYKNAHEYKNYLTQKYDCLRSRDYSVNINSSLLSEAMGDEKTKQWLEYNLSLIPESIEKLKAAQSARGCKVLSVTDTINGYDSITEEVLVTDEVDPGTEKARKELEERLEKRKAEKKETEERLEKQRAEKQDQEERQYNLKIDGKDVADLTGKMVELVGTSIPIGVTESGVSTFDVLAMQNVFLFLSVGLVAINLILMEFMQNTIEKEERIKIAVLTEQNQKIVLQIIRTGKKSMSVSEEKCTIIKISFPQSRRMQKLTESIAVEMSAINTNHPVVNAVLNQKYRSMQEKHIAVILKVGDLSGRGRDCDSAFQFTGMILLSNLLDNAIRESEKVLKNTGKAVIHLKLECEDHKLIFAVRNPVTEKVEIENDTIKSKRGDHHGIGLLNVKAVVDKYGGDMVLSCDENEFKAVVILMGISISNATSSAITKYSESLRSGEPDWSMIPSAGKSNKSQAEFVSEIKELAQRAANTTSKTELESIHRQRTRLCAEYISDVSPDRKALYQQAKNAVKSQNGNPKCKGIGELSLLDFLERAEGKNNNLAQKKFALAGGGTLECPILTGEGYGADISYQGTKVLTYLGDSYGWGCERTPAEREKEREFYGIYFNEYHTQKNAQSSELKELPNYLEEKTSFDRKAMKDFSWEIFAIKTIIFSIWWLSTLPFLSIIVQYIDSITGFSSGNGYHTNHMDYIFESPLVYMGVVLCINIILAIAYLIYCFHKAKREMGMQDTLRAIADPTRREILNLLKHSRLSAGEICNHFSISDAAVSRHLSVLKDADLIRDEREGKFIYYELNASVLEEIILWISELKGEDDYDQTTMIRQHKKMILLTSIITLFPIFIGLLLWNQLPDSLATHWGINNEPNGYASKTFAVFGLPLIMLLGHAVSVIAMNIDPKVKNISEKVYFVILWIIPLLSLFICNVLYGYNLGFQLDMGFLCGLMIGVFYLILGNFIPKVKPNYTIGFRISWALCDPENWYRTHRFGGKCMVIGGIIMIVTAPFQNMWILIALILVPCILPVIYSYLYYRKIISMLFHFTFNQRVICPLIFSSFIQRNYRWQVVYILFMQCMVFVCVIWSFDEMGLREQVILSDKGNRETEQIINIGKVIIFWNRDGRMFYVKDYRLCFFISKNIRDIRRKYNRQFSVVSVEQQFCSVPVKSCRVHPMKTPASGEKTFYTAETPKVYQIFTTDNMLWTGGNGTGLSYCLKYADDSTDENPVVLARGVDENGKEFEQRIYINDVNPSNATVVEMRALEAHYKVEKQGGFTSLPLEAGNMGLNDRRDFIAMFKKSIEDLNKLGRFDLSLLWTKSMDTYLNLPNANSKYKMQSISSYINPNTRGLTSNYKNTAIKDKETYNEAMSQHLLNPVEDLVQVLKTPIKLAKSSSLSRQNNSVNIAEGQRIRVNGGHVLTVTAHGVEVSGGDNPYDTQSYVKAQRMADALASMLRNAGGTMTTVAHSKEEYARYTEGITDVMSYLGVDTSKDFTVNGMKYSKNKDGWYESEANSDAQAAYEQLKANNRTYQFADEKTKKQIAYISDYYLQTVPESVKAAWQETLEETGFNPFQTDVTSTLTQLSVEQDFLTGGDDNIFGETKESCLAAIDKVLERIENPLAAVTEERAAYLQQEKEFYTVLASKIREMIGSIGAESRYSTGYNNLKPNRNQNKWADTLAQTVDKEDISSRADINRAKKSTVMDSYLALSGKTINTLKQEYSEYESENYRIVPDNEAECFDIYNKDGERLGAFSYSDIKIRQDETTGKQFLISEHGTMSYDALVLDDELKDALQNVMDKDSLDVETLQGFTLNTHSGTGIQYLVKDGEEGRGGKVLLQNEADRKRYEELAEMYFDKYPNLIESREEGFIWADLEIRGMAKRTDQGIISIGADGMSYSDNENYKNNWSVQFSGSMYEKLYEWLQNNKDSMEEIHKFSTWQKVFDEIGGTYERVWSKEELDQGYLNNMKIFNYMNNTNSIMEKNTDKVQKGNSQTNEKHTVGQSVKLSISNEGLEYYRNRIQQSGQEKYDDVVQRKELLASKKISDIDYSYEIQKKAAQQNQNVDTGKSALNITDKANNYVKAYAELYDEIVKGYENGTREIYVADENGPRKLTKDEELSNLDAAYKKTVDDFVTMETTNQHARGIIGEEMNKISKITTRSTLASAYIEEQKTRGKDEIPENLTEKMYGAITSFKEKYTMIQPNREQLLMSIKIMTTSTVELKTSRPGVTKTEQIKTGYSNVNDYSKYLQGKYHYMNTGTTSMQGVPTTVSVSSAFLQKCMNDPEKAKYLEENLAAIPDCAKSAVNGCLGTLTNLSYMIDANGNISVAISGTNDPDGKIAKENAERKAKENREKEEKVKEKRAAKKAEEEKAAKKRAEKSAERKETGDYTLSVTGTDVKSMTQSLVAESVSISVPDRSSFDIKAMNSSSVQKQLKAAGIDTNSKKYKAVLSEMMKNGNGAMFTNVQAIKNLMSQYDKNGDWIDPNTGLTGLAVTDENRNSYKHIIMKEWRYYKMSSVNNYMNGIYDNNISCRSCMFCDYVFYNKAKWMIDDEKIIEMFFERSEQGIRELDIKYGKACHNLSYHIVGSRMSYLLKIVRNISLKIYWRKEAAKRSSHYTIALEEIEACIADQKNIEEEIEVRELACIIESFLDTLTIENRVIFMRRYWFSDSYKDIAEFVGLSEKNISVRLTRIREKMKQYLIEREVFVMNAKKFSDAMSELDTKYVDEALNYKTKMKKPIWIKWGIMAACLCLIICVVTIPRLLNGSNPPISGDLAPMVYVNNKLYQYTDSQLDFTDKESQFTYLGEIESKVSSSQEPKENFQANDDIVGAKVYQYENNIVVLIDGKYFLYSHMEDAENETVEFEGQLFNKSDLSEETLEWLEWYNSIPPEKQLAVNSIPAELYTDDGVGTVDADQEKMSMNISGLGNTYNGINTNSKQYKALKEKGWLSGIMQNEAMMSAEERLIYETFGGRDTIIKNLMKQFDSDGDLLNANGVAGMDVTGKGTSWQQLTSVSEEYRQKMFDNVKREFIKENGISNGDTTKRSDIFKDYQLSVSKDKRLSMINGELIVDNFAGGGGASTGIELATGYSVDIAINHDPEAIKMHKANHPNTKHYCENVWAVDPVKACGGHPVALAWFSPDCKHFSKAKGGKPKDKNIRGLAWVACRWAGLVRPRVIMLENVEEFKTWGPLGRRHHPIKAKQGKTFEKFVQQLTDLGYEVEFRELVAADYGAPTMRKRFFMIARCDGKPIVWPEPTHAPADSDEVKAGLLKPYVGAYTQLDFSLPCPSIFDTSEEIKEKYGIRAVRPLAPKTMERIARGLKKFVLDNPEPFIVPIGYGERKGQAPRVHDIEKPLPTIVGSGKHYLCEPTLAPYMGTNTTNHPGGNCKDPIHTITTGNQHCLISPTLIQYHSETAQGEVRGQTIEDPIMTVDGSNRYGLVTSFIQKYYGGNYQGNGSDIKEPLHTITTLERNAMCAVNLIQMNNHCDGRDVKEPIPTITAGDGHFGEVRAFLIKYYGQGTGQDIKAPLDTVTAQDRFGLVTINGVDYQIADIGLRMLEPRELYGCQGFPEDYIIDHDYTGKTYPRSEQVRRCGNAVCPPIPAALVRANLPELCVAERMPNMRIKPEQTGQLRFAMDEKEIFEICQSVDSIIAAELTESIVRGTSYDMLEAHHGILPISRRGFYRRRGTAQRLIRQRMAHLVEEKNGQYMIVWGKTMKVFTHITMVEKYANNAWDFIFSVLIVQLYMIEMTLNIMMLAGFVQNIMGVDKKILEQYVDACEMIRETEQDIKRLKRKRQTIVTGSVKGSMNDFPYAETHFKIEGTSFTYMDDAQLRIEEKLLEERKAQSEEIKLQVEQWMNGIPVRMQRIIRYKFFEGLSWEQVAVRMGRKCTEGSIKMEFQRFMDAAMPKAKDARADKAFEMYKQGLKLIEIANQLGIAEGTVRSWKNRYKWDDNGNATLQKKEKKERNVAKENKQAKRVKKEPVAHEVEAVIQNTDLTDKQQLFCIYYIRCFNATKAYQKAYGSDYTTAMVNGHQLLRNTKVKDEILRLKQERLNREFLSETDIFQKYMDIAFADVTDFVTVKGETVRMNENVDGSLIDEITGTAYGVKVKLADRMKALQWLSDHMDLATDKQRAEIALLKSRADAGKDDRENKLDKFFEQIEGALKDAEMLSDLYTPKQLDTFRFAVNNDYFMLINHGAKRTGKTVLDNDLFLYELRRIKKIAAAQGVENPQYILAGADLGALNRNVLIELSNKYGIEFHFDKFNRFKLFGVQVCCFGHSKINDLGRIRGMTAYGAYINEGTMAKQEVFDEIKSRCSGNGARMLIDTNPDNPEHWLKKDFIDKADGKTIKAVQYRLDDNTFLSERYKQNMKETTPSGMFYDRNINGMWVMGEGAVYRDFNAKIHYISREELQKVNFVKYIAGVDWGYEHFGAIVLLGKDDKGCYYLIKEIARQYEEIDFWLEQAQAIKAEYGNIPFYCDSARPEYVKKFKQNGLRAINANKAVLSGIERVAQLYKQDKLRIADDVDRFRDEIYMYVWNEKTGEPVKQFDDVQDAIRYAIYTDENHGGISILKMELEVMKKLIRKYEPGHTRFSLRAMQAERYYRNETDILVKNKLTDEKEKEEPDNPLRNADNRIPRNFHGLIVNQKAAYMFTAPPLFDIGNEHGNEVVTEVLGDEYRKNCMELCINAANASVGWIHYWEDEDGAFQWAVVDSKQIIPIESHDLKKKLLGVLRMYDEIDEETGDTYAIYEYWDKESCWTFRRKNGDTLEDGLFYYNTFMVPDSSDSTAEYRHEFGEVPFIPFPNNNTNTNDLKNIKPLIDVYDKVYSGFVNDLDDIQQLIIVLSGYGGTDLNTFLSDLKKYKTIKVDGDEGSNPGVSTLNIEIPIEARNSALEVTRKAIFEQGQGFDPQPENFGNQSGEALKFMYSLLEMKAGLTETEFQLGFARLVRAICHHEGIDCKKIIQTWTRTCVKNDTEQAQICKDSVGIVSKKTILKNHPLVEDADAELKQLEKEAQEAQEKADAYIGAFGAKGKETGSETDGDDSGDGVSDRDTQVVRRMDDEEHFWFSNEEEKDAYFKGCLRHEIIHAFLNESGLKDNFEHVNRMGHEETMVDWIAVQFPKIAAVYKELGILMGERTSEYWQERFRQLEESQHDTSVQTVQEIEQEFRRAEQALDGKINAWYQRFAANNGISMVEARRLLNSDELEEFRWDVQDYIKYGRENGINQQWAKQLENASAKVHISRLEALKVQTQQEIEKLYGNYHDSIDEHITNLYTSGYYHTAYEVQRGIGVGWQMQSFNPEKVNDIIHKPWAVDGRNFSERIWTDKTKLINNMHDSLTRMCITGESPDRAIREISQNMKVSRSQAARIVQTESAAFSAKAQETCFSDLGVEEFEVVETLDSHTCPTCGEMDGKHFPMKDYKIGVTVPPFHPNCRGCTCPYFNDEFTTGERVARGADGKKYYVPENMTYEEWKKNFVYTDWKTADIKIPSDIMNISGMTPDYADAIERVYEKMKKEYIVNFQNVTVENWGAKKPDVPFFCQYYEENGKHMAKLVVNSGYDFSGFDAIIKAGYEYKYFAEKRIEDYIEHEIVHILTGQDIESVEDFNAFFEEVKDLYVPGVSGYSDEVQNGFETLAEAYVKIKNGEDVPEKAKEYVDRYIERWKRMEFLKDILGEDLYKQVSDTVNAYNGKPENKDKQVKLADLGSGQYVDKGKYDTAVAEKENLAGQIKTLNTTIGDLKKNNADNETLQTTIANLQGELKKQQTASEEIAKTYALKDSLTKQGVLDPDYLIYKAGGLEKFNFDKEGKPIGVEEVVKPYKDDAAMAHLFKQEQQKPPYNPKNGGAGGVTNPFAKDTFNLTEQGRMLKENPAQAKELAAAAGVTLMAITKIADVIVPELFNRYVINRTMELSAFFQSGIVVNSPEFDALASEAARTHNMPFFEDLQGESEAILEDVKMTAKKIGSNKDVSTTIYRQNMWGASNLSAALAGADPMKAIGDLVASYWARDMQKELISILAGVFGTTTAGAEGTPAAETRMADHILDLTTGKTDAAKQISASAFIDACQLLGDAQAQLSGVAMHSATKSYLKKLNLIETERDSTDVEFDTYQGRRVTVDDGCPVTSGGVYTTYLFGNGAVAYGNGSPVGFVATEVDRDKQTGGGIDYLINRKAFILHPRGIAYTGAKREHVETPLRTELAMAENWKPVYEPKQLRIVAIKHKIGMAEESKLTVERLSALLGISDPDETVKVHLEFALENAEDTVRNYCHIDEIPAGLETTVLRMAMDIYRNEHMGSANIPQTVSSVQIGDTTTSFKTSAAEFSESLMKNYKPVLNRYRKVVFMDMVRMAIEAMYEDTCTVVEHRKTKEKGVVTYTDTVVLENQPCKLSFETIAQAEKTDAASPVAQAVKLFVAPEVEIKSGSKIIVTHCGNSTEYTRSGVPGMHPTHQEIMLDLFKEWAMGNTKVDLKQLEEFRDRVQKAADEEQQRAFMEACAKELAARLLAKVIKRTPVGDYSGEAYECKGKDMNFTHMGNKVSGKTGGTLRRGWTTQAEGSGAEGLDSKSAVQFVDTLKVNHFGDTYVIEVRNSVEYASYIEFGHRKANHKGWVPGHYMLTMSEKEIRDAAPGVLRKKLNKWLNEVFAMINEVLKGITDALYAAFGDDYEIHTEASMQDMEEPAFFVRCINPDVPRGLTGRRKATLLFIVQYFPESDEPKKEINTVYERLSECLDLIEVEGKMVRGTIECKDISDNVMSATTEYTLFLGQSQKDAYMEECEVKGEVNSGRSSMAEAVNKVTYTKEQIIGSKKYAGKVDLLSALLEPGKSYTLEEVDKKMEKYMKGAVRMYGGGQWITQNKVLGGAYINFISAARVTTNLSERGVASMPLELDWGADNVMMEVAQEDFIKNSLTLFGYAYTDDKMQPLRELFAHATKAYIYKLTSGGAKAENTYATAKCCGIRGNDLKVAIAANVDGDGFDVKLYLDAQLVDSQTVASAADLKENAWVTWKETALEATAGVPLAGGTNGTVNGEVHQKYLDLLESYTVNTIGASVSDATTAKLYAAFAKRMRDKVGAKFQAVLYNCAADYEGVINVKNSPDVIPWVVGLEAACGVNATCTNAIYDGELEIDTAYTQTQLENAVKAGEFVLHSVGTEVRVLEDINSLVTLTEDKNELFQSNQTIRVLDQIAMDIASLFNTKYHGKVQNNESGRVSLWNDIASHHKQLEQLGAIENFSEDDVVVSAGSEKRGVYVEDKVTIVNAMSQLYMTVVIEMFNAYMNEQDVPSAKEAEAFVTVGEQRYNLLNAKNFEGKANISTKEIPVLGKIISGRKPTGMVVQAKMTVYKCSEMFDRIVTEYKNTGHLPVFELQTTNNDAATCMGRSTKVYHNCVIDGDVLLSMFDAEGGFVEQEINFYAADYSSPESYKEPSYLMGNLKAFLKQNKKAKKTTQFAATKSLCDENGDPLLWTIRPLSTKESAAIREECTIEVPVTGKPGLYRQKVNTDELLRKMICAAVVEPDLHNAELQDSYGVMSAEALIVEMVDNPEEFGELATFVQEYSGIDETLQEKVDEAKNMQKFHWLPSFFSELDRNEKAFVIASIDLRVEEEKRKAKEIQKMSSIQTAIELSDRMSAPLYNICTAVNMVISNFEALEYASSTAIDTSSMEEARQLLADGMVGLQDITSATESARRKQEEYNQKIQAGSQHTDVLLNKVKSLVGAYVGISTVKNALDLSDELTQTTARLDMMVSQYNALNGTMQTTDELSQMIFLSAQNSRASYMDTAASVAKLGNNARDAFASTGEIVQFAELVNKQFTIAGASATESSNAFLQLTQALGSGVLRGDELNSIFEQAPNLIQTVADYMDVPIGKIREMASDGQITADIVKNAMFAAADDIDAKFNSMPMTWGQLWTYYSNQALMTFQPVLQRLNEMANDQHMKTALTGIMNALSGAATIALNVIDVMVTGGAYIVDNWSMIAPVIGGVAIALGAYTVALGIYNTAQAISNGLKAAAALRESVHAAALAMQSGATFSATAAQYGFNAALLACPLTWIVIAIIAVIAAIYLVVAAINKVQGTTYSATGVICGLVATAGAFIVNTGVGLLNGLIQLIWSIFVEPFLGIVEWVLNVTNGGFDSFGGAVANLIGNIISWFLSLGEVVTKIIDAIFGTDWTAGLNALQNNVLAWGKNENAITLDREAPTIAYRASYSDAYNKGYDFGQGVENKISDFFGGIKDLGNSGDTGALGSYGAASDMAANVANIAGDTSSISDSLDVSEEDLKYLRDIAEQEAINRFTTAEIKVDMSGMSNTVHNTNDLDGIVDGLTTRVLQAMEVVRDGAMGLFGKKIPDGIRVVFYEGDLEGFQCNFASQLLLMDDVLRITKINPYVEARLDRNRISSIDIFSEVEYMAKYKGASVQTSKVKEIPKAYYVINYVDKNGEKKHLDFWGTASESLKIMKMREQLQKDKPSLSYDIMIRIKELRTEMHKSLRDVANDLNISYSSLSKYERGDQQPSYETLIRIANYFNVTTDYLIGITNSKSSENRTICDQLNLSDEAIQKLKQLPLIIDKYNGISLSDILNFIIIQPEFEHLLKSILLYKIRTPADWCNMENFLNKDNTTPIPQHQIKEIDKLYIIQQFNNILSHVLEDEITTYNTVTKTKNDITISTRKETTSDMKRVIIELDEEFHKQLKIFCFTNDITLKDYITGCVKRDLEVKKEQTRMNELMEQVNKTPIEIALGIDEEGMTTARKLYAFLELDSRNYSRWCKSNISENEFADENVDYWAFVINEEWGGQATTDYKLTAHFAKKLSMKGNGEKAEEAREYFTHLEERVKQKAIDFSQLSPELQMFSRIFQSVAEQQLEQKRQAEKVEQLDKKVDSIKDVIALNPNSWRTDSAKIINKIALQMGGYEHIKAIREESYKLLEERMGVALSIRLSNKKKTQALNGVSKSKIDKLNQLDVIADDKKLIQGYVSVIKDMAIKYGVTEVAAYVMYNFYVIEGKKLINYKPGYEQYTRAFTRVEEELEQKAEGISLEQLKRLFPELFVRSLYLFIKYVPVAYEKVEKSNLEEEMIQYFWAFIESVSARIGCLTPQEFVRLFPITKEYDGEKYGMKDYFYTAQKIKAMPDEPIGEENVSEFLFNYCNRDIEEYMVTWMGIVNRLHMLNGGRDITLEFFEDIGMPVHTFHEEAGYMVNDETGEQFKIKKSTKRARKLFSVVSDMDRTALKEREKIIELMSSEADNQPMASQRVIEARDVLDDALEEYIVAVQEDAFYWGYMTAMKRCEKAGVVRMTEVERMTVELLEEMDDMSPEDIENFRREWFEKLEPEQIRNEKVDDYVNAVCDVAISRAKKRLEVAMTVAYRLYMDGILFPVTPSKITMKINGKNETVTLINEGEANILKSPGLTDVDFELLLPAVQYPFAVYPSGFRPAKYYLDKLEALMSAKSAFQYVVTRTDGTNQRLFDTSMKVSIESYDIVEDAGEGLDVTVKVKLRQYREFTTKACTIDISLPKPRAAMQAARAASSNAPSGGSYTVKKGDCLWKIAKQYYGNGSKWGTIYNANKSVIGGNPNLIYPGQVLAIPAAMYELLIQHDSTAYMPPVKEEVKVTTERQISPGVLEFSFVDTGINIGNGDPVRFKDADGKEVFYGFIFRMKRDRSNIVTITAYDQIRYLKNKDTLVYENKTADGVVALIGEKYGFNIGTLANTVWVIASRVEDNVSLLDMISNALDQTLQNTGDLYILHDDFGKLNLSFLGDMYVPVMIDAETGQNYDYESSIDENTYNRIKLVYDNEDAGKREVYIAQDSSNINRWGILQYFDALQKGENGQAKADALLQLYNKETRTLTVKDAAGDSRVRGGSLVVVQLDLGDVKLQNLMLVEKCVHKYGESKHTMDLTVSGGDFSAMHDANDFVRAVQQVSTNANDAGYPATVMSGTVTSSSPLKIKIEQRFEISGSMLILPEHLKEREIKVTVKPTHTEDGGTPEHNHEYGGELTVTVHSGLSIGDSVQVVRQQGGQKYLVIGKVVMIPVSNQLKNVEVVEQPSLCPRMIVESERIIGQCDDVEAIKQAIYNILNTERYQYIIFSWDYGVELKDLFGKPIDYVMPEVERRITEALVQDDRIDSCDSFEFEKKGRKLLVTFVAHTKFGSVPAQKEVDVMYEEQTFDAIMQRMLERIPDTLDKRESSPVYMALAPAAVELASLYVGFDCMLAETFGDTASREYLIRLCADRGITPKTATYAVLELETDVEVPVGTRFTGGDHFYKVTASGQVTCEQPGAAGNEYLGDVIPVEYVMGLTTAKLTRVLIYGEDDEDTETLRLRYQESFNERAFAGNAKDYHDKTLGIAGVGAVKVIRAWNGPGTVKLVILDSVFGKATDVLIQTVQKEFDPNKDGHGDGLAPIGHAVTVDTVSEVTVNIAATITYDNGYDLNTCKTQIETAIEEYFAGLRKNWENQSKLVVRIASIDAAIMGVKGVVDVTGTTLNGGGNVELTEYEIPVLGVVTYGMADRYINLKELLPLYLQAYKELAAPMDAETPEFQIIEAEHNRIIANRYIVTCDEEGIVRYEQLMGIQPKADDTLEDRIFRCITKWNVCLPYNYAFLDQKLRELCGAEYTLDLDIAGQTVTVKVGLAQKNQYDVVAEMLEEIVPCNLQLNLSLLYNQYQALKPYPHIILAQFTHWELRNLSIPRNLSAAVENIAAYAVDDLARFTVEEVADIGIRKKVMKLTDLFKFKLFERKDVADLAVVNENFQTAESEIDKRLLKTAVQNTNTVTEAGYALDARQANPNVKGSLAELIAALSEMLTSHKSSGDHDSRYYTKTDMNTMLARKADSEHNHDKVYYTKAFVDGLLALKADLTHYHDNRYYTEAETDARMAKAARYVGLYEQEITLAAGGEFYQAIPSTYQNGGYIYFINCSGNSLNFTANMEGYNMAVKNRGASTLATRVQVYFFSIGVMKLKTSKDTYEIVSANHENGKLNIVFENQSCESLQDIFSVKNDLARLEIYDHDERTSIITEYVVLERVVLEDNHATVVLGRESDDYSQRVTDLASKLAEASATASEMAETVTATNKTVDGNTTDIQKLAADMDYLAMQMEVTLDEMSKHYEKVKGYYDKKLWSKTRVYNAVGKWITAGEYEEITGETYEEPAKKSAEEDTTMMMKQTENYGFNVPEEHEFYDVAAQNENWEKLDAALTQIESRLQEIAEAKQMESIITALITGGLTLIGTVMTVSSGQKKTDHKLEMAQAVTDCKLDELTREVRMHNNFAQRVPVIEEQVKVINHRIADLEEGKMLKNCVLRVSVDTQKWAKAAGIRALKTMAQTAVAVIGTGAVISAVDWKMVVSSAIVAGVVSLLTSVAGIPEVEGMANKRIGQAGLDLIKQYEGCRLAAYRCAAGVWTIGYGHTAGVHSGMTITQAQADXXXXQQSRIRSDHGAAMPNYNKAAGKVLAGLRRRRAAEQALFNKPVSAATPAQNQNTEDYNMKTIKKGSKGNAVKVWQIIIGAAADGIFGSGTESATKTWQSNHGLAADGIVGKMSWKAGLEALMLNLISNYTLANFKSLILLRKRNFLLPMRCQLLFVNNCMPDIHFPMNSVSGNSLKNSLITGTLLLTLAGVLTRIIGFFYRIFLSRLIGAEGLGIYQLLSPVMALGFAVTAAGIQTAISRFVSSELAQNNPAGARLYFRIGLLLSLFLSAATGFVIWKYADFIGVSMLGDVRCIPLLKIISLSFVPCCIHACINGCYYGQKKTGVPALTQLTEQIARVGTVWLLYQIHMREQTAVPLSVTMWGAVMGEVASTLVSVSVAKLPEGTDTALSVKCGTRNLLAMAVPLTANRVVLTLFSSFENIMIPSRLRLFGYTASEALGVYGILTGMAMSVIMFPSVITNSVSVLLMPAISEAKAGGNDALIRRAVLKTIRVCLLWGFFCTAGFLATGHFIGNVLFGNALAGTFIRTLGWICPFLYLGVTLSSILHGLGYPGITFVLNLIACGIRILFVLFALPVYGIRGYLCGLLISQAVMALLSIGILLRQTHPTSRSASAKMCDQEYKAGVVYLDNAATTRMAEEAEAAMQPYLVEKFGNASTTYGYGEEAQAAIAHAREVIAASLDARPSEIYFTSGGSEADNWAIKGVAEAYGKYGRHIITSRIEHHAVLNSCHYLEEQGYEVTYLDVDQNGMISLEQLEHAVREDTILISVMFGNNEVGTIEPVMQIGRFARDHQILFHTDAVQAYAQIPISMQQYHIDLLSASAHKFHGPKGVGFLYIRDGVTMPSFIHGGSQERGKRAGTENVPGIVGMGKAVELAFCNMRRRIRREMMLRNYLIEKIMHEIKGVRLNGHPTNRLPGNVNVSFSGVDGASLLILLYEDGICASGGSACNTGEERVSYVIGALGVPDEYAAGTVRMTLSGETTRKEIDRAVEALKQNLRKLRDEKMHKNNYAVCFLRENRKKRLQKTAKIGHRNEQIARTFKWFTGCVKFDKEKKLCNNCAEIRETRLVYSRKGMNNMIERKIRLSDTEEVKEFVRAAGKCDFDIDVCYNRAVIDAKSLLGMLYLGLSKDLTVKYGGQNTGFENTVQKYAVCMDAQQEKDEKKIIKISVRNLVEFILREGDIDNRHGRTASPEAMWEGSRIHKRIQKSKGANYHAEVPLKIELSEGDYTLAIEGRADGIEITCDGERQLDFSDNFNHFTVEEGMHVTIDEIKGIYMNLDALDEPVGVHRAQAMCYAYIYALQHDLAEISVQLTYCNLDTIELTKTAFLGNLKYFRETFSFAELAEWFTRLTDEYKKWADFQFAWQNLRQASIKKLEFPYAYRKGQKELASDVYRTIARRKNLFIQAPTGVGKTISTVFPAVKAVGEGLGDKIFYLTAKTITGTVAKEAFELLRTRGYQAKIIQLTAKEKLCLCEEVDCNPVHCPYAKGHYDRVNDAVYNLLQKEDVFTREVILEQAREYRVCPFEMSLDTATWADDIIGDYNYVFDPNVYLKRFFAEGTRGDYIFLVDEAHNLVERSREMYSASIYKEDFLAAKKLLKPYQEKHDRRAERVIRHLEKCNRILLGYKRECENYVVYENIGTLIFALTRLAADLDEYLQKSPDFPERREVNEFYLNLRNFMNIYELVDEHYVVYSEHEEDGRFKLKFYCVDPSLNLQERIDKGNATIFFSATLLPIQYYKSLLSTRRDNYAVYAQTAFSEEQRLLLFGNDVSSKYTRRGRAEYERIALYIEKTARAKQGNYMVFFPSYRMMQEVYDVFLEGGETDEMRPQEYFPEGAENAEIVEHPEEAEIAEHPEEAEIAEHPNDAENSGNAEPRLWGMMQQTGMREAEREAFLQAFSGEASKRRGGSLVAFCVLGGIFGEGIDLKKEQLIGAVIVGTGLPQISNEREILMHYYDERAGAGFDYAYRFPGMNKVLQAAGRVIRTTEDVGVIELLDERFLKSDYRGLFPREWEQRRICNVNEVEQMLAEFWERRQELMDINYELYKVFYYVATSLSFSEASKQLYISQSAVSQSIKTLEKKLEQPLFIRSTKKVQLTPAGKILLKHIEPAMNLIRRGESQLLDSGSLGLGQLHIGASDTICRYFLVPYLKQFHKKFPNVPIKVTNSTSLSCVELLEQGKVDLIVTNFPNSNLNQSYIRKTVCSFHDVFIANPAYFNLKQQEIALEDLQQYPILMLDRKSTTSEFLHNLFLQHQLELMPQIELSSNDLLIDLARIGLGIAFIPDYCLNRESKELFIVKIKEKLPARQMVTAVNPTLPIAQSTEEFLKLLPSLPELGMSNVRRVYVEKKPAFAVRARELEAEIRNYLGISDVKGVRELIRYDMEHVSEETYRKALVTVFSEPPVDDVYEENFELNGARTFSVEFLPGQFDQRADSAEQCVKLLNENEEPLIRTAVTYVIEGEISDAEFEAIKKHCINPVDSRETGLEKPQTLVQSFPEPEDVKIFDGFSAMPEAELKELYDSLGLAMTFKDFLHIQNYFKNEEKRDPSMTEIRVLDTYWSDHCRHTTFSTELKDVSFDDGYYRAPMEETYQDYLATHKNLYAGRSDKFVCLMDIALMAMKRLKKEGKLMDQEESDEINACSIVVPIEVDGVTEEWLVNFKNETHNHPTEIEPFGGAATCLGGAIRDPLSGRTYVYQAMRVTGAADPTVSVKDTIPGKLPQKKLVREAAHGYSSYGNQIGLATGYVKEVYHPNYVAKRMEIGAVLGAAPRRAVQRLTSDPGDIIILLGGRTGRDGIGGATGSSKAHNTESTAVCGAEVQKGNPPTERKIQRLFRREEVAHIIKKCNDFGAGGVSVAIGELADGLRVQLDKVPKKYAGLDGTELAISESQERMAVVVAPEDVQKFLAFAKEENLEAVEVAVVTEEPRLVLMWRGKEVVNLSRAFLDTNGAHQETNVAVDMPDPKENYLNKIDTPAVSEALAAGDMKKAWLAELADLNVCSQKGLVEMFDGSIGAGSVYMPFGGKYQLTETQSMVAKIPVMTGKSDAVTMMAYGFDPYLSSWSPYHGAVYAVLESLSRIVAAGGDYSKVRFTFQEYFSRMSEEPKRWSQPFAALLGAYNAQIGFGLPSIGGKDSMSGSFNEIDVPPTLVSFAVDVAKEGDIITPELKAVGNQLVLFSIEKDSYDLPVYAQVMKLYAVLHELIGKGAVVSAYALDGKGLAAAVSKMAFGNKLGVTIEKEVSEETLFASGFGNIVAEVPVEKVGIVKEALKAAGLSGNEELVGWVNEEQSFCYGGMKLALDEAIAAWSGTLEKVFPTRVTDNKDELDTGIYQADSIYVCKHKVAKPTVFIPVFPGTNCEYDSARAFERAGADTIVKVFKNLNAEDIRDSVEEFTKAIDQAQIIMFPGGFSAGDEPEGSAKFFATAFRNAKMTEAVMKLLNERDGLALGICNGFQALIKLGLVPYGEIRPQTADSPTLTYNTIGRHISKMVYTKVVTNKSPWLAQAKTGEVYCNPASHGEGRFVAPKEWLEKLFANGQVATQYVNEAGVPTMDEEWNVNGSYMAIEGITSPDGRVLGKMAHSERRDRSVAMNIYGEQDLRLFESGVEYFKMNILVLGGTGFFGKHLVWELLHRGHEVTIATRGRTPDDFGDRVRRLIVDRTDVRQMEQVFAHKYYDVFYDDLAYCAGDVRTVLEAVPCRRYVMVSSASVYDLHFQTVETDYEPEHDRLVWYTDYSGSYDVLKKSAECALVQQYPMKNAAFVRFPYVIGRDDYTDRLYFYVEHVVRQKPMYIDNMDAQMSFISVDDAGRLLAHLGGDEIQGAVNGASRGTISPREILTYVYRRTGKEAFLDETGDPAPYNGTPGYSINTERAGRTGFVFSNLKDWIYELLDFYIERAAEEMRKMLWDTHMHSQYSGDSDAPQEDMIRAAIRAKLPGICFTDHLDIDYPDNPEAFLLDLPNYTSSVFAMQEQYRDQISVRYGIELGLQPHLAALHADILSQYDFDFVIGSSHVVHGYDPYFPPFWKTHTEEEGYREYFESILENIRAFDDFDVYGHIDYVVRYGPTRNENYTYARYSDVIDEILRLLIEKGKGIEINTGGFKYGLGHPNPCEEILARYRELGGEIITVGADAHAPEHVGFAFEKVPQILKDAGFIYYTVFRKRKPEFIKIEDMSDLIFLLILFVFVLILSATPLFRKSRSQRDYESSGMQLLATSRGRVLLLPALGCLCACIVTFFMVLMYQDIGFEASDIGSLLSCIGITILLVVVCFLGGYAMQARHVLYNEEILLIGKPFRPYQTIHWYEISEMRIKNQDFFDLYDRNGRRCVSANANLEGYRQFYQASLRFTRPEYTAKQKSTPYDNPVSAASGCGTLRYRTGEYYALLILYAVVMFLFFGLTVFSGESISGTLQIIREEKLYGALFFPVAFVGTVLALFYVSLQKITYDREKIVISRFPRRTQTLLRRDIRQLECTSGSQGLRTLTLHTDNRRYVIREKQFRVGFPEFFNELIHMVCLQVTRKKYNTAGVQRQQIFRRIFRFCIFFRKREKKPVIMAVRVAINGFGRIGRLAFRQMFGAEGYEVVAINDLTSPKMLAHLLKYDSSQGKYEHADEVSSTDDSIIVCGKEIKIYAFPDANNCPWGELKVDVVLECSGFYTSKEKAQAHINAGARKVVISAPAGNDLPTIVYNTNHKTLKASDTIISAASCTTNCLAPMADALNKYAPIQSGIMVTIHAYTGDQMTLDGPQRKGDLRRSRAAAVNIVPNSTGAAKAIGLVIPELNGKLIGSAQRVPTPTGSTTILTAVVKKAGVTKEDINAAMKAAANESFGYNEDEIVSSDIVGMRFGSLFDATQTMVNQVSDDQYEVQVVSWYDNENSYTSQMVRTIKYFSELAMSLNKKSVDDINVKGKRVLVRCDFNVPLKNGEITDETRIVAALPTIQKLINDGGKVILCSHLGKVKNGPNEGESLAPVAKRLSEKLGKEVVFVSDYNVTGEAATKAVEAMKEGDVVLLQNTRFRGEEETKNGEQFSKELADLADDYVCDAFGSSHRAHASVAGVTKFISAKGGSNVVGYLMEKEIAFLGNAVENPVRPFVAILGGAKVADKLNVISNLLEKCDTLIIGGGMAYTFLKAQGYEIGKSLVDDSKIDYCKEMMAKAEKLGKKLLLPVDAVTIADFPNPIDAPVEVEVCDVKNMPADREGCDIGPKTAELYAEAVKTAKTVVWNGPMGVFENPTLAKGTIAVAKALAETDATTIIGGGDSAAAVNQLGFADKMSHISTGGGASLEFLEGKELPGVVAADDKMARKKIVAGNWKMNMTPSQAVKLVEELKPLVVSDDVEVVYCVPAIDIVPVVEAVKGTNVAVGAENMYYEEKGAYTGEISPEMLVDAGVKYVIIGHSERRDYFKECDCMLNKKVKKAFEHNLTPILCCGETLEQREMGVTLDWIRLQIKSDLKDITAEQVASMVIAYEPIWAIGTGKTATTAQAQEVCKAIRDCIAEVYDTDTAEKVRIQYGGSVNAGNAAELFAQPDIDGGLVGGASLKADFGKIVNYKMPKKCKGKRNALVVTVVAVLLGDIFAGGQNIPAQQKTWNAGDTKRTQMTESATQRMDLTDAFAVILQGATKKFIAGYAVDDSFLMWLAARYGDEKVVRIASAVLDGTEDPEVWYDITGSSIHVLWLMYCRDSGFQQYRLQNVYWKEAGEDGKIVLGFAGDINFADDWYTMEYMNRQTNGIYDCFSEDLLSEMQNVDVMVMNNEFTYAESGSVEAVPGKAYTFRADPEDVELLSVFGTDAVTLANNHVYDYGEEGLLSTLDCLRKADIPYTGAGENRKEASKILSFVIGGRKIAIVSATQIERATKYTKEATETEPGVLKTLNPAAFLEVIREADATSDYVIVEVHWGTEGSLHEEKSQRLLAELYAEAGADAVIGGHPHRLQGCGFTDGVPVAYSLGNFWFSTGTLYTTLAKITITEDGAVTLSYVPCIQKGLVTSILTEQDDKDGFYHYLAAISDDIGMDADGNVYDKTAGDYPSQVIVYDSDTSKTKIRGTTDNDGYAIDIVGNRKMSKKPTVLMILDGFGLNDKTEGNAVAQAKKPNIDALMKEYPFVKGNASGLAVGLPDGQMGNSEVGHLNMGAGRIVYQELTRITKEINDGEFFSNQALLDGIANVKENNSDLHLYGLLSDGGVHSHITHLYGLLELAKRQGVKNVYVHCFLDGRDTAPTSGKGFIEALEAKMAELGIGKIASISGRYYAMDRDNRWDRVQKAYDVLTKGEGETAESAVAAMEASYAKDVTDEFFVPTAITENGKPVATIKDKDTVIFFNFRPDRAREITRTFCADEFDGFDRGARKNVKYICFTEYDVTIPNKEVAFKKVELKNTFGEYLAAHGMTQARIAETEKYAHVTFFFNGGVEEPNVGEDRILVKSPKVATYDLQPEMSAPEVCEKLCAAIRSEKYDVIVINFANPDMVGHTGIIPAAIKAIETVDTCVGKAVEALKEVDGQMFICADHGNAEQMVDYETGAPFTAHTTNPVPFILVNADPSYTLRENGCLADIIPTLIELMGMEQPAEMTGKSLLVRKMQEFKPVKEGKVREVYDNGDSLIIVATDRISAFDHILKNKITKKGAILTQMSKFWFDYTKDIVPNHMISVDVKDMPEFFRQERFEGNSMMCRKLEMLPIECIVRGYITGSGWASYQENGTVCGIKLPEGLVESDKLPEPIYTPSTKAEIGLHDENISFEESVKVLEKIYPGKGADYAAQIKDKTIALYKKCAEYALSKGIIIADTKFEFGLDENGNVVLGDEMLTPDSSRFWPLEGYEAGKGQPSFDKQFVRDWLKANPDNDLLLPEEVVEKTVAKYKEAFELLTGKPFQAMSDNRINKNQPVGDELHEECGVFGMYDFDGGDVASTIYYGLFALQHRGQESCGIAVSETNGPKGKVTSYKGMGLVNEVFTEENLEPMHGDIGVGHVRYSTAGASTRENAQPLVLNYVKGTLALAHNGNLINAAELRHDLEYTGAIFQTTIDSEVIAYHIARERLKSSTVEEAVGRACRKIKGAYSLVVMSPRKLVGARDPYGFKPLCIGKRDNAYILASETCALDTIGAEYVRDVLPGETVTITPENGIVSDLSRALPKEQEARCIFEYIYFARPDSHIDGVSVYASRIKAGRFLAMDSPVDADLVVGVPESGNAAALGYSLQSGIPYGTAFVKNGYVGRTFIKPKQSSRESSVRVKLNVLKEAVDGKRIIMIDDSIVRGTTSDRIVKMLRDAGATEVHVRISSPPFLWPCYFGTDIPEREQLIAYNRTIEEIRDIIGADSLGYLGIDRLSEMADGLPICKGCFNGIYPMEPPKEDIRGDYERMSTDRYSSPLSERYASKEMQYIFSQDMKFSTWRKLWIALAETEMELGLSENGKPVITQEQIDEMKEHVYDINYDVAKEREKLVRHDVMSHVYAFGQQCPKAAGIIHLGATSCYVGDNTDIIIMNEALKLVHKKLVNVIAELAKFADTYKNLPTLAFTHFQPAQPTTVGKRATLWTQEFLMDLEDLEYVMSTLKLLGSKGTTGTQASFLELFDGDQETIDKIDPMIAAKMGFKECYAVSGQTYSRKVDTRVANILAGIAASAHKMSNDIRLLQHLKEVEEPFEKNQIGSSAMAYKRNPMRSERIASLSRYVMIDALNPAITSATQWFERTLDDSANKRLSIPEGFLAIDGILDLCLNVVDGLVVYDKVITKHMMAELPFMATENIMMDAVKNGGNRQELHEKIRQLSMQAGKNVKEEGKDNNLLELIAADPEFNLTLEQLQATMEPSKYVGRAPVQVDAFLANVVNPVLEKNQDELGVKAEINVMNNFIITTDTTSDLPAAYVEQHQIGMLSLTYTINDTTYSWEHPLPVKEFYDCMRQGSLPTTSQANPEEAAAVFEKIINEQNADILHIAFSSGLSGSYNSARLAAEELSEKYPDRKIIVIDSLCASLGEGLLVHKAVTLKEQGHTLEETADWLESNKLHLVHNFTVNDLFHLYRGGRVSKTAAFLGTMISLKPLLHVDDEGHLIPLSKVRGRKKSLIALVDAMEKQIGSWRDKNDIIFISHGDCIEDAQYVADLIKDRFGYESFLINHVGPTIGAHTGPGVVALFYMGDYRMWIKSNYLIKDVLILHRFLTYVNSIFQIYIFFRNYYRKLFFSHCFHYNKYKYMYQEVLMNIVFWGETHRSGTTANYTAMASILPHLCPDRKIVCGSLQRERCEDSALFLWDAGVCSPAGQKKLLLTADLVVVNFEPQDYDGMEQFFLRHMYLEKRMVYLYANCIGTPEPDVLNRVYRVDEGQIGIVRYNAAYDCALKRGLGSSFIAEEYGSARSGRNQEFIDGLVKAADRILRDVCKIDKTGHVWMEQVMKHYGNAILAIIVLLALGAIIIAALSSDGYVATEFKNALTGFFSRMNGLTPMGEIMTFEPTEAQFGVFWKYLQRPNVTDVDYNGSELWITDLKIGRYRVKEHLSDAFISTFTHNISNCVNRQFNNANKVLEADTRELRISIIHEAAAASGTSICIRKSPSMVRMNIERMLEESYCPERILQLLMNCVLAGMNFVFGGEPGAGKTECAKFFMQFIPREERVITIEDSLEIHYRDINPGADAVELRVGEDFSYTDAIKASLRQNPKWLVLSEARSVEVTSLLEQWSTGVSGFTTIHLDDVRKLPDRIQNMMSDARDAERMENRIYRYVNVGILIRCVRQPDGKIRRYMDQLCFYGREQYENRIYMILEDGELLSEELPPAIVRRLGQAGIEDPFCCAHWQRYRREGKMKREGLWEKLRLLNPKNLQREVHVYGYRFSWRTHLMAVIAALVGIGGIGMVFQLKPLFLAGVLLTVLFVFPVLVLDMYKKMYEQKRFGDACAYMEQLLYAFQKTGKIVSALKEVRGIFGEGQIRLCVEEAIAHMEYGHPVGEQGVLREGLQKIERYYACDKLATVHELLLNAEEYGGDVEASVTLVLEDIERFKKRGYQLQAEKRKSHTDNVISIVVAVLLCAAALYLLNEMQEMFTSEAGVSVFTVPVIQISSMVFLLLLLAFYVKSVRSLTADWLEEKPLYDTAYIRHSYELVMGYEKKAQQYRRLIPAGIVTMTAFVLWTVGWRITGILLLVTGLLVAMQPRISYRIAERDVTAELYQVLPRWLFEMVLLLQNNNVQMAITKSAQHAPAVLGSELAELCARMDERPDQLQTYTDFCKKFDLPEMLSCMKMLHAFSENGTGDIDVQMNHLIERVVLMQERADVLRSEERAFRMKLIFAYPVLAATGKLLADLTVGMALMMQVLGGMGGAMKYIIEVFSVMLVLVFNLLLCVSMLGVSADVAAAKEFKAAMIAEIENSDFNPYVIDGCKAQAGTEGYELEVQSYTYGGQSDRRIAGINLYYRYRIPLLGVSQQRVTRGIARMQWSLEELGMTMLVLLVGWFGCTAIQEIWMQVAGMLMKEIAEVYGNGFLQIAGGIGALLLFFHAVDGQGMIGMVLQYYMTGICGSMEQVLQCYGKGIAAGIVLITVMVLLFAGIRDEQGNRGIINIVKTWIPEEETITENAAIDAFAEAGEVAYPTIRYAYNGMLHRGAYLPGDLFSAVDGMGEERSVLWCEMTDPHGNSCTIESQQGDVVFDVEGIYTVRVCATDEANRRSVCEFQIPVNRMKNAAMIIVSAIMGFLILGIVLTIGGSMNRRCEVETILPSAMEKTVEGMPFAEAGCSSGELVIAECVELLAAEIDTDSDVVLKVYQNDVQKGVLSMKLQEKFQHPNGMEGMAEAVRTIIREQRENLPKDQYRVRFYRNREGMLGEGSCYKAYTVEEGQCLQPPAEPGGDGVVFAGWHDWNDYAADFSQPIEENRDYYAAWEMKKRGMAIVLAAAVIGMSVIAGSFTTVRAADEAGIRAFVTRMYEVCLVREPEEAGLNDWSNRLATGQELGADTAFGFIFSEEFRNLNLCNEHYVDSMYAAFFDREGDAAGKADWLGQLNGGATRGHIMTGFVNSQEFANLCAAYGITQGSGDWSADDIPVNGTCAICERNGRIEATSEMRAFVERLYTCCLERSAEEDGLNDWSRALASGAEGSEVASGFIFSQEYKKKDASDTQYVLMLYRTMLGREADTPGVTDWVLQLRNGSSREAVYNGFVGSAEFAALCQNAGITVGGAIADNGTTGRVSTGERVLVQVDEYVNGVYGDSYTFYATEGEIIHLEDDIHLYPGATVTVEADTFVAYEGAVGKTNWIGNVVFDMKSKLIKQKRWWLRGILMVLFAVGMFFITMNVQTEAGTLQYRAEISSSTRENNITFVCNLNQTIDGQQVGYQWQENKGSGWQNIFGATGASYPVNRVGKAGYQYRCTLTITVNNSYSLMNECYKAFLHRQGVASEFQHWWPYLYEHTQDEYLVTVYNALETPPQNEAARVAMEIVFSDEYMKKYKNNRLDYNTSVNGDTLNGPKQLIVDSYRFLLQREPSVDEVEFWYSEYERNNGRPQKFGYPDANNVTHKHDTYSGMGYVINAIAQSEECANKMAAAYHYDGVRGVFLYTESDIEYQADIYHVTSDVATIPEEAYRVILQKGTGIQSVTGAGSYAMGQRVTIDATPATGYHWKSWMGTYEANTKSYTFQMPAQDVIMTANAEINHSTLRIDPNGGSWNGSADIQRFRENYGTAMSIPDPVRQGYVFSGWVKSEVFHGSLNHAMYTFGADDGAVDVLTASWTANSYTLHFDPNGGVEAAHIEDMVIRYDEEIILPDAAAAYVKYTFDGQNVTQDVLSGAIRQYAAGTYESLDLENAVLEALETILPDERKNEIEDETVATPATGEKPDDSILDEKNEMRAAQADGEPSDDLQTETEEQVAAVGENNAETGNPETEIETEPAADRSVYVSVNTGWVTEEEKENYVPQWTAGMQVSVADLIEASGVADQNGAMITLYASWDDCPWIVATNLYYTLEQAQQGVITDSEILSHATASDREDGSPIEAGFHENGTSFSIPDYQASDFTQFLRGGSCTENLTVVDSAGSIYCKQITVYVVDTTPADARTERTTRFIDEKYYGSSYERGGLLDDSIWKTDTAYVSALRTAFGNLENDAPVETYMINGETRRKIREYVDAHGFGDNREAGALQEMYDRYLVPNCVRMDSSDIFQIIFLVLLLMLSAFFSSAETALITVNRIRMRTLAEDGNKRAATVLRITDNSGKMLSAILIGNNIVNLSASSLATSLAIKIWGSVGAGIATGILTVLILIFGEISPKTLATVNSEKLALTYANVIEVLMKILTPVIFIINKLANRICKLFGVDPNADTQKMTEEELRTIVDVSKESGVIESEEHTMINNVFDFGDAQAKEVMIPRIDMTFAQVDSSYDELIQIFQEDKFTRLPVYEDTTDNVIGILNMKDLLLCHDKDHFSVRDIMREPYFTYEHKNTAELFMEMRKSSISLAIVLDEYGATAGLITLEDLLEEIVGEIRDEYDTDEEDPIVQLSDREYMVLGSTNLEDLCDEIGLNFTSEDYDTIGGYLIGLLDHLPEKNEVIITDDDVLLRVEQMDKNRIEKIYIKKPEAPVSDAEEHTMGTIIGEGITFDDVLLVPQYSEVTPNMINLTTHLTKKVVLNIPMMSAAMDTVTEHRMAIAMARQGGIGIIHKNMSIQAQADEVDKVKRSENGVITDPFFLSPSHTLQDAEDLMRKFRISGVPICENNKLVGIITNRDLKFETDFSKKISESMTSEGLITAPEGITLEEAKKILAKARKEKLPIVDKDFHLKGLITIKDIEKQIKYPLSAKDEQGRLLCGAGVGITGNMMERVEALVKAHVDVIVVDSAHGHSRNILEAVKKIKTAYPELQVIAGNVATGEATRDLIAAGADSVKVGIGPGSICTTRIVAGIGVPQITAIMDCYKVAKEAGIPIIADGGIKYSGDMTKALAAGANVCMMGSIFAGCDEAPGTFELYQGRKYKVYRGMGSLAAMENGSKDRYFHEGAKKLVPEGVEGRVAYKGNVEDTVFQLVGGIRSGMGYCGCPTIEDLKEKSKFVKISAAALRESHPHDIHITKEAPNYSIDEMEFRPCIDIHNGKVKQIVGSSLADEGDRAVENFVAGADAAYYAHLYKEAGLRGGHIILLNSRDSAYYEATKAQALQALAEYPGGLQIGGGIDAANAKQFLDAGASHVIVTSYVFRDGKIDYERLATLRKNVGKEHLVLDLSCAKRADGYYIVTDRWQKDTRERVTTELLERLGSECDEFLVHAVDVEGKANGIERELASLLGSWGRIPVTYAGGVRDFDDLALLRELGCDRLNVTIGSALDLFGGSMPFEKVTEYCRMSKYTKQDIIRIVEEEDVEFIRLQFTDMFGTLKNVAITSSQLEKALNNECMFDGSSIEGFVRIEESDMYLYPDLDTFVIFPWRPQQGKVARIICDIYTADRKPFEGDPRYALKKAVADAESMGYRFDVGPECEFFLFNQDEDGQPTTMSTERAGYFDLGPVDLGENARRDMVLTLEDMGYEIEASHHEVAPAQHEIDFKYDEALKTADNIMTFKLAVKTIAKRHGMFASFMPKPKYGVNGSGMHVNMSLSKEGRNIFDDPDGENGLSREAHWFIGGIMNHMRAMTAITNPLVNSYKRLVPGYEAPIYIAWSMTNRSPLIRIPVSRGSRTRVELRCPDSAANPYLTLAVCLEAGLDGIRRQIDPPAAVTENIFEMRLSQIKKQGIESLPADLGEAVEAFKADPYIREVLGEHISEKYSEAKMAEWADYRAQVTGWEIDNYLYKIMTNIIVAFPKQDNARNIKKILMQNGHHVDAVCSTGAQVLQSAGELGGGIVVCGYRFVDMMYTELHEYLPVQFEMLLVASPANCGNRDVENLVCLATPLKVNELLDTVEMMEYTITRRRKKLKQIPKERTKEEQELINEAKALLMERNNLSEEEAHRYIQKRSMDNGTGLTETAQMILSLLAMYKINDNYQKLPGSYLFSTIAKKVNAYSEANPDKKIIRLGIGDVTQPIAPAIIEAMHKAVDEMGHAETFHGYAPDLGYEFLRSAIVKNDYQARGCDITVDEIFVSDGAKSDSGNIQEIFAQNNRIAVCDPVYPVYVDSNVMAGRTGTYDPETEMWSDVIYMPCTMENNFVPEFPKETPDIIYLCLPNNPTGTTITKDQLQGWVDYANKNKAVIIYDAAYEAYISEENVAHSIYECEGAKTCAIELKSFSKNAGFTGVRLGYTVVPKELKCGEVSLNAMWARRHGTKFNGAPYIVQRAGEAVYSEAGKAQLKEQVAYYMKNAKAIKQGLKDAGYTVFGGVNAPYIWLKTPGEMTSWEFFDDLLARANVVGTPGSGFGPSGEGYFRLTAFGSYENTLAALERIKMLMLFHSFSFLLFFPLVTGMYFLIPKRAKQLWLLVASYYFYMSWNVQYGCLILLVTAIGYGGGLLLAQNKVRQGKRRLAVLTGSVLLCVGILFFFKYFAFAVQNINELLRAVGSVRALRVPDLILPVGISFYTFQTIGYLIDVWKGKTEAEKSFLRFALFVSFFPQLVAGPIERSSSLLAQLREPAEFDYDRVKDGLLLMLWGYFEKMWIADRAAILVDQVYQDYRNYSSGMLVFATVLFAVQIYCDFGGYSHIAIGAAQVLGIRLMDNFRQPYFAVNCREFWRRWHISLSSWFRDYLYFPLGGSRGSSGRTAVNLMITFLVSGLWHGAGWHYVVWGAIHGSYQVAGRGIRYVSEAVQKRLPEKKIRFFSEKTRGLTRAARICVTFILTDFAWLFFRADHLGRAVAMLRRIVQNGNWLGQFSDGTLFGMGLCRLEVCQLALAIGVLLVVDILHESGISIRAWLAKQVLVIRWSIYMLVLLGFVVLLLQNYGRASVEFLYFQFMKRFTKKLIAFLGIFAAVLLALDLLSATERFRGAFAVLTDSSGYEEEAEREVSAYLAKSRMPGSYTKLLVGDSVCAQMTEAFFDCNQQYCLVGNNRALTMAGEYLLVKEFLETHENVSEVWLMAGPDLLQTSIDATYSYSYVVLPFLQADLLDELDEETAEEMEETFGSLFLKKPVAELIAGSAVNRKLYLNYVKEREEALEKGESRENQTVGMSDLAERYLRKIYELCDAQGVACYLIPDPLADTPARRKQVEQIWQDFETRGLERLFLDYFSEITYYPADQFSDGIHFGRPYNTKEVYREKLRELYLDRGYLDGFQIMLDVLLDTVLDSVRLLPFLFLTYLFMETLEHHTGSKLSRKIQFAGKWGPVWGGLLGVIPQCGFSAAASSLFAGRVITVGTLVAIYLSTSDEMLPILISESVPVVTIVKILGSKVIIAVLSGLIVELVYVRLLKKQEKEMDIHVVCEEEHCHCEDGIVVSALKHTVKIFCFIFLISLVLNGVIGLIGEETLAGLFSGLPVVGELIAALVGLIPNCASSVVITQLYLDGIIRSGAMMAGLLVNAGVGFLVLFRLNRDYKQNAAIIATMYVLGVLWGVMIEACGIVFMFAKAKVHMERSRMPCLHEAACSVPCERARESGKTEFFRTFAEAMAGSGYATNSRRKILDFLKNNSDRTVTAADIDQYLKRNGDAVNITTIYRYLDKLATDGTVMKYVAEAGGKAVYQYVELGQHCEEHLHLKCVKCGCIIHLDCGFMDEIAEHIQKDHGFQLQCKNSILYGICKDCRQEMLRIGIYPRKSVYRDNSDSVQVQITACKDYARLMFKDQKLDFRIYDKDEGFSGKNTHRPSFTELMADVKADELDIIIVYKLDRISRSVKDFSEIYETLQQHNVSFLSVKESFDTSTPMGRTVMYILSAFAQLERENTAERVADNMASLGEAGKWTGGTLPPGMASVRKKIGDKTHSYLIVDAQRIKTVKYIFSLMLSGTSITKLEHTLRQEGIRTERNAFYSCSKLYNLFTNPVYCANDMDAYYYFLEKGYKLPDPALFDGRHGLIGYGRTTQSNGTTVIKDTYSIAIGIHDPILSGADWIAIQKRLGQNKSTRYAKYEAGILKGTLRCKCGVKMNIRTYKKNGSLFSYYYCPKMAREGASAYDTGYTRVNDIDDRFLQELKKIKLSPDSIELEENVSYVDTGKMRADLKKTTDSIRNLINALSGSADSAAAKYIIAELESLDKEKAVLEKKLRTAEQRNRRVALSAETKEFVYHRICNLLDKISAVLCPDVRQKINPVKMLLFSVTAYVILVCPGQCLIRHIKIYPFDITVRRCFHGMRDRIVAYNKLAGLRGIVDAYLHHCQSISKSAEYLEVTEEFLIASLNYYRNKYGVYTKLDNYVIFFQPNLVVMELIMDSFIAAELTESIVCGISYDMLEAHYGILPISRRNFYRRHRTAQRLMRQRTAWLVEEKNGMKQRDLIKKLEAAGFTLERHGGNHDVYVRGEDKEQIPRHKEINEVLARAIMRKWGLMKQVYPVIFTQLNDEKDTVLIEVPDLEILTEGFGMADAVEMARDAIGLKGICYEDEGKEIPTPRTMAEVNSSKGTFAGAGESFVSLVDIDFQEYRRRADNKTVRRNVTLPNWLNQEAEKAHVNVSRVLQEALMMKLGVSRMGVDKKILEQYVDACEMIRETEQDIKRLKRKRQTIVPGSVKGSMNDFPYAETHFKIEGTSFTYTDDTQLRMEEKLLEERKAQSEEIKLQVEQWMNGIPVRMQRIIRYKFFEEMSWEQAAVRMGRKSTEGKKPDVPFFCQYYEEYGKHMAKLVVNSGYDFSGFDVIIKVGYEYKYFAEKRIEDYIEHEIVHILTGKILKAMQNGFETLAEAYVKIKNGEDVLEKAKEYVDRYIERWKRMAETVTATNKTVNGNTTDIQKLAADMDYLAMQMEVTLDEMSKNYEKVKGYYDKNLWSKTRVYNAIGKWITAAEYEEITGETYEEPAKKSAEEDTTMMMKQTENDGFNVPEEHEFYGVAAQNENWEKLDATLTQIESRLQEIAEAKQMLLKLIVFLAVADYVTGVIKGIYTKTLSSETGFKGLLKKIVMFIVIVVAYTIQKLLNDTIALREIVIMFYICNEALSLLENAAMFIPIPDKLKDVLLQLRDKEVEDNGKMANRKIGQAGLALIKQYEGCRLAAYRCAAGVWTIGYGHTAGVHSGMTITQAQADAYLQQDIAKFEGYVNNPAYVPITEQLNQNQFDALVSFAFNLGAGNLRKLCKGRTAAQIAQAMTQYCKANGKVLAGLRRRRAAEQALFNKPVSAATPAQNQNTEDYNMKTIKKGSKGNAVKGYGRSSSARLRTASSAAARNRQPRSGRAITGWRQMAWSVRMTGGRNPAGMLCKLTCVMPVFTDKQDDPCKIEKKILVHFMEKTVKIKCKYYQLRAVSNGNITENLYDLRQWINDIEEMPLDQRKRNVSNIVGRLEEQVVVGDSECYVLNFMRMDEVSTVYKVKGNQPAEHVDIDVESNEHIAKNTVVLYDAENGIVMIQSNRGSYTEKSIQGYINSFFEEQVCCLLPIFDNVNFMGNDVDYLKLDVRLANIRQFEATSNSSFEYLVDGINRVEGLNAHIEIGLGYNRNAKLNSDEVRIAIADLVNNKGCVTSAKFRLSDDQKSGVYDLFDNLCNDTVVCAVNDRTGGIPFEVLAERMYDKYIYEHSRDRVLSALINMDRKEKAKYKWKEIYSYIVPSVITAGYFVCIILAEKGKIEVTLMQQSKYFEKMLESLITFMSIILSVFGFLIPTFLGGKGDTKAINYFLKYADMKIFAAKLKNIVAVGLIDIFITSVLLLTDIIPNMIMNIIIIIWLWLLFFFMCSSYRFISIMINLLLVEKEDYVQKAANEVSEETKMEVHKKLRKIMTAGDVIGYMGHTGYSTKENVNNIDTVHLHFGLQLIFDEAQKEGNNEIWVDCYNLTRFLYKNRSAVQKVGESREWKRTLQMTDPAVVKYQKTIKKQMIERRWIQKGYRIFFAIALLICVGGIPAYAEELVPDAGEITGRVLFISSYSYAWETVPEQIRGIKEALGAGVQLDYQFMDTKNVETAESEQLFYQTLTYYLKMVPAYDVVIVGDDAAFQFAMTYRDELFAQTPVVFEGVNDGELAKKAAADPLVTGVVETLSYENTITLAKKLYPDARQVVGILDDTVTGEGERKEFQYYDTVFPELDFVEIDASKLSQEELKRQVAALGEESILVYIMCSRDGDGNVYAAAEAIQMLSDVAQIPMFSIVSHGMGKGFLGGEIVSQEQMGKRAGEMAVQILEGTDCAGISIVMEPPKVYCFDENVMRRFGISASKLPGDAVIINHRETFWEKNRDTIRATLVIAAVALAMVAWLAVDNMRRRKMNEVITRANEKLSYSAHYDVLTHLKNRSVFMEDIRQRIVSGEEFTVFMYDLDNFKRVNDTYGHNTGDEVLREVALRSLAVEDGHFTPYRLAGDEFVALIDCGDYRVIERYASGLMERLQKPCRMGAADEALGVSLGIAVWPEHGADATELLAAADAAMYTVKKNGKNGFAFYKEPCAPMKMKREDVRNIAIIAHVDHGKTTLVDELLKQSGVFRENQEVQERVMDSNDIERERGITILSKNTAITYKGTKINVIDTPGHADFGGEVERVLKMVNGVVLVVDAFEGVMPQTKFVLMKALELSLPVIVCLNKVDRPEARPNEVVDEVLELFMDLDASEEQLDCPFLFASARDGYAVRELDDLVNNKKDMTPLFDTILDYIPAPEGDPDANTQVLISTIDYNEYVGRIGIGKVDNGCLKVNQEAVVVNHHEPDKQKRVRISKLYEFDGLNKVDVTEAKIGSIVAISGIADIHIGDTICAPENPVAIPFQKISEPTLSMNFIVNDSPLAGQEGKFVTSRHLRDRLFRELNTDVSLRVEETDSPDSYKVSGRGELHLSVLIENMRREGYEFAVSKAEVLYHTDENGKKLEPMELAYVDVPDEFTGAVIEKLSQRKGEMLNMKPITGGYTRLEFNIPSRGLIGYRGEFMTDTKGNGIINTIFNGYAPYKGEIAYRKLGSLIAFESGESVTYGLFSAQDRGTLFIGPGEKVYAGMVIGSSSRAEDIELNVCKKKHLTNTRSSSADEALTLVPPKILSLEQALDFIDVDELLEVTPESLRIRKRILDPTLRKRAGMKKMADKIFENNQVSIMGEIVSDFRFSHEVYGEGFYMVDVAVNRLSNYLDYIPLMISERLIDVNADYIGQIIYVTGQFRSFNRHEEKKNRLVLSVFVRELEFLEELQEDMKSNQIFLDGYICKEPIYRKTPLGREIADLLIAVNRSYGKSDYIPCICWGRNARFASGFEVGGHVQVWGRIQSREYVKKISELETEKRVAYEVSVSKVDFLEEMAIFKGAGVAIVTPMKENEEVNYDKLEELVEWQIEQGTDAIVIVGTTGESSTLTTEEHSDVIRAAVRFAKHRVPVIAGTGSNCTREAIHLSEEAEKAGADGLLAVTPYYNKATQGGLIRYYTEIAEAVKLPIIMYNVPGRTGCNIMPETAATLFKNVENIVGIKEATGSLAQASKLMYLTDGKIDLYSGEDGIVVPLMAIGAIGVISVWSNVAPADVHDMCAAFSAGDLLRARELQLKAQPLVDALFSEVNPIPVKKALNLMGLEVGPLRSPLTEMTPENAAKLAEAMKNYGIKLAMIKAIMNGCNGKMGQVISAICKEDPQIEIVAGVDLYDGIKNDYPVFPNISVCDVKADVIIDFSNAKAVDDLLVYSVDKKIPVVLCTTGLSEEQMEQVKAASGQVAVLKSANMSLGINLLMQLLAQAATILAPAGFDMEIVEKHHNQKLDAPSGTALALADSMNDALGHVYEYKYDRSSERKKRDPHEIGISAVRGGSIVGEHEVIFAGLDEVIEFKHTAYSRSVFGKGAVEAAKFLAGKEAGFYDMQDVIRATMEQADMEKYMETDLRYLKSLANQYPTVAAAATEIINLQAILSLPKGTEHFITDIHGEYDQFQHVIRNGSGAIKRKIEEEFGNAISAGEKKAIATLIYYPEQKLEQVLKTEENMEDWYKVSLYRLIRICKSASSKYTRSKVRKALPKDFAYVIEELLTGRPDVSDQEAYYNEIIRSVIRTGRAPELVIAFCNLIRRLVVDHLHVVGDIFDRGPYPNLIMDTLMQHHSVDIQWGNHDIYWMGAAAGSRPCICNAIRISAKYGNLNLLEDGYGINLVPLARLAMSRYDKDPCTCFKLDYREDEYDVRDAMLDEKMHKAITVIQFKLEGQMIMRHPEFGMDERLLLDKINIEKGTVCVEGKEYPMKDLNFPTIDWKHPYELSSEEEDVMERITQAFLNCEKLQRHVRFLFTQGSLYKVYNGNLLYHGCVPMNEDGTFTRVNVYGKEYSGKALYDVLENYARKGYYAIDPGEKKKGLDILWFIWENQNSPVFGKAKMTTFERYFIADKATHQEPKNPYYRLLEEEEVVNRILSEFGLEGAEAHIINGHIPVEAKRGESPVKCGGKLLIIDGGFSKAYQPKTGIAGYTLIYNSYGLVLAAHEPFESVEKAVQDGSDIASHTILVQHVVRRKLVADTDIGRELRASIRDLEALLQAYRDGILVEKIMYIGNHLSASKGYAAMGRMAVKLGANTFAFFTRNPRGGAAKAIDPADVEKLLELMREQQFGKLVAHAPYTMNLCAAKEDIRKFSKEMIADDLRRMEYTPGNYYNFHPGSHVGQGADAGIEWIAEALNEVLTPEQTTTVLLETMAGKGSEVGRSFEELRAIIDRVELSDKLGICLDTCHVWDAGYDIAGDLDGVLEEFDHVIGLNRLCAVHFNDSMNDRGSHKDRHACIGEGKIGLDAMRRVATHPLLSDKPFILETPNDDEGYRREIALFREWREMCAQHTGICLFLWNRKLRPYYIKTLRAGFFLVLQKMPCYAKAMEAGSQKRAPVYEALEQLKKRRVVPFDVPGHKRGRGNPELVELLGEKCVSLDVNSMKPLDNLCHPVSVIKEAEELAAEAFRADHAFFMVGGTTSSVQSMVLSVCRAGDKIILPRNVHKSVINALVLCGAIPVYVNPEVDKKLGISLGMEISEVERAILENPGAVAVLVNNPTYYGICSDLRSIVKLAHEHEMLVLVDEAHGTHLYFGEDLPVCAMDAGADMASVSMHKSGGSLTQSSLLLTGKNVNWEYVSQIINLTQTTSASYLLMSSLDISRRNLALRGRESFRKVAEMAEYARAEINDIGGYYAYGKDMVNGGSVYDFDVTKLSVYTRGIGLAGIEVYDLLRDEYDIQIELGDIANILAYISIGDRIQDIERLVGALADVKRLYSKDPAQMLNTEYINPTVLVSPQAAFYAEKKCMPIRETAGKICGEFVMCYPPGIPILAPGEMITPEIIEYIIYAKEKGCSMQGTEDPAVEHLNVLVDDRQVWKMEYGLGKVEESVELWFSDNQTDHVKVSVKVEKQLFGEQTDFQRIDVFESREFGRFLSSDGSIVFSEKDEFIYDEMIVHVPMAVHPHVKKVLVIGGGDGGVARELSYYEEIEQIDVVESDRTFVDVCRKFFPDNACGLEDPRVNIYYEDGLRFLRTKHDAYDLIINDAIDPLGHTAGLFTKEFYGNCYRALKEDGIMVYQHGSPFYDEDEESCRVMHRKASHSFPISRVYQAHIPTCSSGYWLFGFASKKYHPLTDLNVERWKARGIKTWYYTTNLHKGAFMLPKYVEDMLEEEEGRRMGRLLIIGCGGVAGVAIHKCCQNSRTFSEICIASRTKEKCDALKEKLQGTTDTVITTAKVDADNVDELIALIRDYKPDAVLNVALPYQDLTIMDACLACKVDYIDTANYEPEDTDDPAWRAIYEKRCKEAGFTAYFDYSWQWAYQKRFTDAGITALLGSGFDPGVTSVFTAYALKHYFDEIEYIDILDCNGGDHGYPFATNFNPEINLREVSANGSYWEDGHWVETKPMEIKREYNFPQVGEKDMYLLHHEEIESLAKNVPGVKRIRFFMTFGQSYLTHMQCLEDVGMLSTSPIQYEGREIVPIQFLKALLPDPASLGPRTVGKTNIGCIFTGKKDGKEKTIYIYNVCDHQECYREVGSQAISYTTGVPAMIGAALVVDKVWDKDGVFNIEEFDPDPFMDMLNQYGLPWVVDENPKTVAMKWNELPTPCYVVDQKKLKENLIILHNLEQDTGCHVLLAQKAFSTYALYPLIGQYISGTTASGLYEARLGAEEMGRENHVFAPAYKDSDMEELVTLCDHVIFNSFAQYVRHRKKVAARNAVSDTSHRVSIGLRINPEYSTQEGHAIYDPCAPGSRLGMTREAFEKGLAGLGMRRQEDGSYELPEDVEGLHFHTLCEQDADDLECTFYAFEEQFASYLKQVRWLNLGGGHHITRPGYQIGRLKKLIGYIRENYGLAVYLEPGEAVALNAGYLVTEVCDIVHNGMDILILDASAACHMPDVLEMPYRPPLRDGFAAGEQKYTYRLSSLTCLAGDVIGDYSFAHEIQIGDRLVFEDMAIYSMVKNNTFNGIPLPSIALLMEDGEVEMLKQFGYEDFKGRLSMEKKMQKCAEDPKERMTTPQADGFFMPGEYEPHDGCILIWPSRPGSWIYGARDARIAFRDVIAAIAQSENVYVAAGRDAIDSAREMLIGEDAPWKKRVTVFELETDDAWARDVAPTFVKDGAGRMRAVNWSFNAWGGSVDGLYASWALDDAFAKAFAAKYGYACYDAAPFVLEGGSIHSDGEGTLLVTEACLLSAGRNPGLTREEIEEKLRTYLGIEKVLWLPRGIYQDETNEHVDNVCAFLRPGEVVLAWTDDETDPQYPLSQQTLAYLEGETDARGRKLVIHKLPIPDHPVCITEEELAGYSFAEGEDEREAGERLAASYVNFYFSNEAVILPAFGGENEESDRRAAALLAQWNPGRKIISVQARAILVGGGNIHCITQQIPAAKMQQQNAAAKMMNRVKVAAIQMRCAASVEENLKKAEAMVRKAAAEGANVILLPELFEREYFCQQRRYDFYHYAKPVMENDAVRMGMRLAAELGVVLPISFYERDVNNLYNSIACIDADGTVLGVYRKTHIPDDHYYQEKFYFTPGDTGFQVFSTRYGRIGVGICWDQWFPESARCMALAGAELLFYPTAIGSEPILECDSMPHWRRCMQGHAAANLMPVVAANRIGEETVEPCEENGGQRSALVFYGSSFLTDETGEILAEAGRDEEEILVQEYDLDELDARRLEWGLFRDRRPECYGIISGRMKDREELLKEIALMLERQDMLSKLTENQCLDEYGYSETHCIDYIGRLELPNVTKVAEHMGMTRGAISKMTKKLLAKGLIEKYTLETNKKEVYFKLTDQGRLLFDEHAKRHQRWEKRDMEFLARYSVEDVRTVSRFMTEFNGYLEEQIETITGTQAEGMSITILNYHDQAFVDQINAEAAARAEAERAAAEAAKAQAASSDFSSVLTNATDAYSGSTTCSGDLSAIFDEAANTYGVSSTLLKSIARAESNFNTSAVSSAGAVGIMQLMPATAASLGVTDSYDAYQNIMGGANLISQLLAKYNGDTSLALAAYNAGSANVDKYGGIPPFSETQNYVQKVLSYMGSDTNTVASASTAETSEDVATTVSNFIAANNISQDTVEKLLTLLEVLNAMKTKQVERKGTYLRAFRAAFPCTVPVLTGYLFIGMAFGVMIQEKGYNFLWAMLMSLVIYAGSGQYLAVNFFAPGVSLLNVIFMEFMVNIRHIFYGLSLLERFSKMGKKRLYMIFSLTDETYSLFFVTKVPKDVKEEQFLFAIAVLDQSYWIIGSGIGALLGNVLPFSTEGIDFAMTALFVVIMVEQWMEKQNRPSVVIGLVCGLVCRLVFGADNFILPTMICVMVILLSCKKIFDKMIPEDGKEGGEPECQMPVSVGRSLAIIFTVAGTIFFTRLIPFLFFPKGKEIPPIIRYLGRVLPPAVIGMLVIYCLKNVSVLAAPFGLPEFIAVAAVIMLHVWKRNNLLSIGAGTALYMFLIQVVFMKKKPFVTKEQLEEIVKKYPTPFHLYDEKGIRENAKAVKEAFAWNPGFREYFAVKATPNPFILDILKEYDCGCDCASLTELMLADSQGFDGKHIMFSSNDTPAEEFAFANELGAIINLDDFTHIDFLEKTIGRIPETISCRYNPGGVFKMSNGIMDNPGDAKYGFTHEQIIEGFKILKEKGAKHFGVHAFLASNTVTNEYYPKLARELFELVVELRDKTGCDIRFINLSGGVGIPYTPDQTPNDIRVIGEGVRVAYEEILVPAGLGDVAIYTEMGRFMLGPYGCLVTTAIHEKHTHKEYIGVDACAVNLMRPAIYGAYHHITVMGKEDAPCDHKYDVTGSLCENCDKFAIDRMLPKIDMGDLLVIHDTGAHGFSMGYNYNGKLKSAEVLLKEDGSTQLIRRAETPEDYFRTFDCFDILKDMKHPKMCIDTERFERARGRVIGIERQRLGIGTLSEKTVHAVLKNYYAPDEDMHEIPIENFVADIFDGEAVIEIQTRSFQNMRRKLAAFLPLYPVTIVYPIPHVKWLHWMDEETGEISPGRKSPKKGNAYQAFIELYKIRPFLKDPNLRLRLDLIDMEEYRLLNGWSRDKKKGSDRFDRIPLTFVEEVRVDRREDYMQFIPYEIPEEFTAKDFAACAKIPVRLAQTVLLLLTDLLIVERIGKQGRSYLYRICEIEMKNTAIKLSGILLAGAVFFSTLLGYGTQVAAATAIGSDTEAGQASGDGSVTSVADLPGKHIGVQLGTTGDIMVSDYETDGSGTVVERYNKGADAVQALKQGKLDCVIIDELPALAFVEQNEGLKILEENFVEEDYAFVIAKGNEALVDQVNETLRELKDEGVLDSIAKNYTGTDEEIGKYPYEILDVERTNGTLTVGTNAEFPPYEYYEEGKITGIDMDIMQAVCDKLGMELKIEDMAFDSVIPAVSTGKVDIGASGFTVTEERKKNVNFTDTYAKSKQVIIVRDTSVTAEKTGIAEKFYDNFIKDSRYTYLLKGLLNTLIITVFAVMIGIVFGFLIAIVRTNHDRNGGLTILNALCKAYLAVVRGTPVMIQLLIIYYVIFQSVNTGKLFVAVIAFGLNSAAYVAEIVRSGIMAVDIGQFEAGRSLGLNYKQTMLSIILPQAVKNILPALCNEFISLLKETSISGYIGLMDLTKGGDIIRSVTYEAFMPLIAVAAIYFLIVMGLSKAVGLLERRLRSNERMSDNTVILEVKELHKSFDGHEVLKGISTTIKKGDVLALIGPSGCGKSTFLRSLNLLEIPTAGHVLFEGTDLTDPSVDINHVREKIGMVFQQFNLFPNMTILENIMLAPVKLGKMTKEEANTRAMELLKRIGLADKAGAYPAQLSGGQKQRIAIVRSLAMDPDIILFDEPTSALDPEMVGEVLAVMQELAEDGMTMVVVTHEMGFAREVANRVMFINDGVIQEEGIPQEIFGNPKSQRLQEFLSKVLMQQAKNVFCILHQEYLPQAESGAEHRLQDVRLYDKINNDFMKWNKYTIETTTAAEDYMSAMLADLGIEGVEIEDNIPLSKEDQADMFIDFLPELPPDDGVSHVSFYLEDDGEDRTELLKQVKEALEDLRKVVDVGSGVVTSDQTEDLDWINNWKKFFSSFYIDDILIKPTWEELKPEDADKFLIEIDPGVSFGTGKHETTQLCIRQLLKYIRGNDAYTPENRTPKVLDVGCGSGILSIVALKLGASAVVGTDLDPDCMTSTHENMEVNHLDPSLGTFYVGNLIDDAALQEKVGTEEYDIVVANILADVIIPMAPVIPARLKRGGYFITSGIIDFKENAVKEAIEAAGLTVVEINHQGEWVNITARKPEMYQFFVEDEQIANDLVIIEGSDVNHIRNVLRMKCGEKVRISSTSGRNFFGTIDRIAENVVEVCITEETALDTELPCRICLFQGLPKSDKMELIVQKAVELGAAEVIPVAMKNCVVKLDAKKAAAKTARWQEIAKSAAKQSKRSRIPVVREPVNYREAVALAGELDVVLLPYENERGMAATREVMERIAPGQSVGIFIGPEGGFDPSEIALAKEEGMHLVSLGKRILRTETAGLATLSILMYHIESVSEAEEERDQPMVLKQMEAYLDNSATTRCSERAKNKMVQILTEDYGNPSSLHNMGKTAEDYIKEAKEQIAKTLRCDEKEIIFTSGGTESNNMALIGGALANKRQGKHIITTAIEHASVQAPLAYLKELGYEITELSVDHDGIISLEELRDAVREDTVLVSIMMVNNEIGAVEPVEEAAKVIKAKNPDTLFHVDAIQAYGKFRICPKKMGIDLLSVSGHKIHAPKGTGFLYIRDKVKVKPIIYGGGQQKGMRSGTENVPGVAALGEAAAEIYENFDAKIGHMYEIKQRFIDEVTQIPGVTVNGKTGRDSAPQIVSVTIEDVRSEVMLHSLEEYGIYVSAGSACSSNKPAPSRTLQGIGLPKQKLESTIRISFCVNTTEEEVDYAVEKMKEIIPFRRKFTRKMTYKAFLIKYAEIAIKGKNRYLFEDALVSQMNHALKKVDGTFHIRKEQGRIYVEMEGEYDYDGAVEALQHVFGIVGICPVVLLEDEGFDALAGEVIRYIDEVYPDKHFTFKVNARRARKNYPLESMEINAQMGERILEAFPETSVDVHKPQVMFNIEIRNQINVYSTVIPGPGGMPVGTNGKAMLLLSGGIDSPVAGYMIAKRGVTIDATYFHAPPYTSERAKQKVVDLAKIISKYTGPINLHVVNFTDIQLYIYEQCPHEELTIIMRRYMMKLAEHFAKENKCLGLITGESIGQVASQTMQSLAATNEVCTMPVYRPLIGFDKQEIVEISEKIDAYETSILPYEDCCTIFVAKHPVTKPSLNVIHNDERKLSEKIDALMQEAIDTVEVIHIEAMKTVQISLNSIDKVKSFVNAITQYEYDFDLISGRYVIDAKSIMGIFSLDLSKPIDLAIHAENNMDEIMETLKPYLIMKAALHNLGCKVNAYETEAMQQILEEAGYEIVPFSEYADVYVINTCSVTNMADRKSRQMLHRAKKQNPDAIVVGAGCYVQTKEAQALVDESIDIVIGNNKKHELVPLLREYEASHRKMACVADINHEKQAYEELSLSRTAEHTRAFIKVQDGCNQFCTYCIIPFARGRVRSRELPDVLQEIRTLAKSGYREVVLTGIHLSSYGVDNGESLLHLIEAVHELEGIERIRLGSLEPRIVTDAFAKRLSELPKICPHFHLSLQSGCDTVLSRMNRRYDTAEYEVGCALLRRYFEHPAITTDVIVGFPGETDEEFETTERYLERIHFYEMHIFQYSRREGTKAAAMPDQVPEAVKKERSEKLLALGHRMSEEFRRYYLGRQVTALLEEEFLYDGKRYYTGYTKEYVKVAVETEKDLSNTFVTGTLKTQLTEDIYLLVEFMQEINNTQYFKVEKGPELRVSDVLAIVYRALMEKGYNPVNQIVGYIMSGDPTYITSHNNARSLIMKVERDELVEEMLKAYIRNNNWEMRILGLDFGSKTVGVAVSDELMLTAQGLEIVRRQSPNKLRQTLARIEQIVTEYQVERIVLGYPKNMNNTEGERCEKTKEFAQMLERRTGLSVVLWDERLTTVAADRHMMESGIRRENRKQYVDEIAAVFILQGYLDSLAFQKHMEKVKFVDPDTGESLAFFVVEETKVGGTHYLLATEEEDGDCDAYILKEVETKDEESVYVLVEDDTELSAIGKVFAELLDDADIAFMKKEKKENSGKLKIIPLGGLEQIGMNITAFEYEDSIIVVDCGLSFPEDDMYGIDLVIPDITYLKDNIDKVKGFFITHGHEDHIGAIPYVLREINVPIYSTKLTNGIIEHKLREHNMLTKVKRKVVKYGQHINLGCFRVEFIKTNHSIQDAAALAIYSPAGIIVHTGDFKVDYTPVFGDAIDLQRFGEIGRKGVLALMCDSTNAERPGFTMSEKTVGKTFDEIFADNKNHRIIIATFASNVDRVQQIINTAYKNGRKVVVEGRSMVNIIGIASELGYISIPDNTLIDIEELKRYPDEQTVIITTGSQGEAMAALSRMASGVHKKVTIKPNDTIVLSSNPIPGNEKAVSRIINELSMKGANVIFQDVHVSGHACQEEIKLIYSLVKPKYAIPVHGEYRHLIAQAKVAEELGIPKENIFLLSSGDVLELNDEAAAVTGRVHTGAIMVDGLGVGDVGNIVLRDRQHLAEDGIIIVVLTLEGGSGQVLAGPDIVSRGFVYVRGAEGLMDDAKHLLDDTMQHCMDKGITDWGKIKTEIKDSLGDFVWKETKRRPMIMPIIMEVMKWNKVVFKFVSISFSILVALLVVVGLIELGSYCYDFGYRVFTESPVDEAPGRDVTVSVTADMSEHDIGKMLKEEGLVEDANLFYAQLKLSAYSGKLKPGVYTLNTSMTAREMFVIMAADAGDTESTEDTEDTANTGAEDLTDETDDTQTAEDAGDAEETPMIVDERLVTYINSLDTGNTAMLDQIEREATADYVPIIRKEMQSFLKFLLAMKKPARILEVGTAVGFSAILMAEYDPVPCQIITIENYEKRIPIARENFKRAGKEAQITLLEGDAAEVLKTLEGPYDFIFMDAAKGQYIHFLPEILRLLARDGVLVSDNVLQDGDVIESRFAVTRRNRTIHKRMREYLYTLTHSEELVTAVLPVGDGITLSTRRMRRPELLIPASSLEVLKIAVIYGADAVYIGGEAFGLRAKAKNFSMEEIREGIAFAHAHDVKVYITANILAHNGDLDGVREYFAELREIKPDALIISDPGVYMIAKEVCPEIERHISTQANNTNYGTYRFWYEQGAKRVVSARELSLAEIKEIRANIPDDLEIETFIHGAMCISYSGRCLLSNYFTGRDANQGACTHPCRWKYAVVEEKRPGEYLPVYENERGTYIFNSKDLCMIEHIPELMESGIDSFKIEGRMKTALYVATVARTYRRAIDDYKQSPELYREHMAWYQEQISNCTYRQFTTGFFFGKPSDEAQIYDNNTYVKEYTYLGIVGEQNEEGLYRVEQRNKFSVGESIEVMKPDGANITVTVQRIVDEEGNDMESAPHPKQVLYIDLGQPLAMYDILRRKEMKQEKYVAYVGTYTHENSVGIHIYDVDVEAGKLTERKVVPINNPSDLVVSKDRRFLYSIADEGVESFRIEKDGDLTPINKQWIGGMRGCYVEVDDGNRYLFVGGHHDGRVSMMHLEADGSIGGIADGIFHKGIGRSIAQRNFVPHVDCVKLTPDQKFLCAVDNGLDQVKVYRVDYENGKLELIDIIRGPLESAPRMIRFSRNGEYAYILYELLNIVEVYHYSVQDNEPVFEKIQTISTSPKKEEDTCAASGMEISKSGKYLFCSNAGVNSVVCYEIEEKTGMLTPVFTTKVNSDYPKMLAIYPDEKHYLTLNNNSNDIFSYTIDYKDGYSLETGSPVKVDKPNCIYMLKLEVEMRLFSLICPLFLDIYYRNMIHFMCGKILVFVPIFMSNHQNAFVNDNLAYPYSMIQNVFLELLKEKPVAKITVKEICEHAEINRSTFYKHYQDVYDLMEKLENEAVEAFEKLLDSYVQNETVPALVTLLTSLRENRELLLPLLANSSNDDFMKRLTDACSGYALSHLTPEADYTSNPKQAAVYAYLAGGTSGIISNWLETGTQEPPQQVAELIQSLNETVLTVLVPMANKRTYLVTGAAGYLGSEVCRQLLEQNESVRAFVLPNDPAIQYIPKDVEIVEGDLRDKASLETFFHVDADTETVVLHCASIVALGMEMPKIVMDINVGGTQNIIDLCLEHKECKKLVYVGSTGSIPEAPKGSVMKEISYYDPEPVISAYGKSKAMASQLVLDAVKNQHLNACLVLPSGILGPGDNAIGQVTDGLLKQMNGEAAIGINGTFNLCDVRDLANAVILAVENGKSGESYILANEVITYPEFANIVAKEGRCKRPLFFLPLPLASFVANILEKQAQKKGSTPALTKYMIYNLSRNNAFDSSKAKKDLGYKTRPFHETIRDEIAWLKEIGKLQGTNTVNTVSFNDMIEFLFILAILAIVPPPPKKTETPLVAVRIHLMSSSKIRMKNMKLTEGPIVKNMLLFALPMMLGNFLQQIYNIADMFIVGRFIGSDALAAVGSAYTLMTFLTSLIIGLCMGSGALFCGNSLYIFVMGIVFIFLYNFYAYLLRSVGNSIVPLYFLAVSSVLNVVLDLYFVISLKMGTPGAAIATVISQGTAGIGCLFLLYGFYRGIGRAEMSFILTVISLGTRVVLAYVFAPIIGVTAIWWAIPIGWLLADTVGLIYYKNASLSYIDRETLYSNRKSMMNTLPQDFLVGAATAAHQVEGNNIHSDYWAMEHMKYGNFNEPSLDAVDHYNRYEEDIKMVAEAGLNAYRFSIEWARIEPKQGVYDENEIEHYRKVLTCCRENGVEPIVTMMHFTSPKWLIENGGWENEATVEAFKNYCQYVTEQLGDLMHYVCTINEANMGIQVAAISARYRAQMMAKMQRMQQGGAEEKKDLEGTAQVGMNFNDMMANMQKQKEENVEIFGTDTLQTFVSARTPEGDMLVIRAHQAARAAMKAVKPELQIGLTLSLHDIQAQEGGEETAAKEWVDEFTHYVPYIKEDDFFGLQNYSRSLIGPNGILPVPEGAEITQMDYEYYPEGLEHVIRRVYEEMPMPIMVTENGIATADDTRRVAYIQTAMKGVENCIQDGIPVKGYMYWSMMDNFEWQKGFGMTFGLISVDRTTQTRTAKPSLTVLGNYTKMELKDNWMFVKEAENAADAASKKGTAVSLPHTWNAVDGQDGGNDYHRGTCWYVTKFQKPELEAGSQVYVEFLGASVIADVYLNGEAVAHHEGGYSTFRVNLTDKLQEENVLAVALNNADNNYVYPQKADFTFYGGLYRMVNLIVVPESHFELDYAGGNGIAVTPTVECDENRVPTGKASVKVETWVTGNADSVVITITGEESESKTVSVVDGHAEATFELEHVHLWDGVDDPYLYHAKAELSSGDVTETTFGCRSFYTDPEKGFVLNGRVYQLRGVSRHQDRTGAGNALSYEMHKEDMEIIKEIGANTIRLAHYQHAQEFYDLCDEYGMVVWAEIPYITMHMPNGRANTLSQMEELVVQNYNHPSIVCWGLSNEITAATPVDEDLLENHRLLNDLCHKLDKTRFTTMANVFMQETDSPLLEIPDVNSYNLYFGWYLGELEQNDEFFDEYHAKYPDRCIGFSEYGADANPQYQSTNPTHGDYSETYQTVYHEHMLKMIEERPYLWATHVWNMFDFAADGRDEGGKHGVNQKGLVTMDRKLKKDAFYLYKAYWNKEDAFVHICGSRYVDRKEDTTEVKVYSNQTTVSLYVDGTLLETQDGSRIFRFAVPMTGEHEIVAKAGAEEDSIHIRKVEEANPDYVMGEIKDVINWFDDEPYKPECYSIKDKMSEIKASPKAGAILAELMAQAPGAESRGDVAESVKDNPNLVRMMGRMTLESMLGHMKDSITEEQVKGLNRMLQQIKKGEMTINERLEFFKEMLRCNYDVYLWTYTPELELIHTNCPQDLVISDASSILDFADTLQEYVTSGKRTPIWLDSSMGLLYISVFEYEETELKHIHMLGPILRGKNSHLLIKKDLDSRTLSVKLRSKIFRQIDQIPVMPSSSLYQYTLMFHYAVTGEKITTADISYPQGQTSDSNDLKLISDEHAGIWKAEQEMLQMFREGSPDYRKALGKSTNLSSGVKFDIGDSLRKQKNDVIVLLVLCSRASIEGGLNPSIAYTLNDYYMQKLEEAKSASTINNLTHTMLEDFMQRVRSAKQTTDVSSQIQNICDYISVNPGEKFSIAELAERTGYTEYYFSHKFKKEIGISIADFIKQVKLEKAKLLLSATTMNIQEISDELAFGSRSYFSSSFQKAFGMSPSDYRNKNTKLMKLKGKIDMMAFLKELKKCTGEVFFETPDGDCLALKSALSQYIFCTIANEPELFETGTLRFEYESDISLLLPWIEEIMKEKKKKLTQSEIDGVQYRRAKLWQIICYACNAFIGMSVYSLIGMASYSASIGFGVATAVVGVILTCTRILDGITDPLLAFVYDRVNTKFGKIRILMVAGWGIEAIGLLGMFSWLTGKFTGIAGIVVFTVLYVVYVIGYTIVNMTGQTIPVLISNDPKQRPTIGVWVTALNYLLPMTLGIVFNVVLLPKFGGTINLEYLSAVCKLVIMISFIGLVLVCLGVSEFDKPENFEGLNVKKEPLKVKDMVAVLKENKPLQCYVAAAASDKIAQVTASQAVITTMMGGIIIGNMGLSSILGMVSMLPSIIFAIFGARYAGKHGSQEAITTWTKVCLVLGAILIVFFVVIDPSKIGVMFSSSMIIYVVLTLFLNGAKMCVSTANTSFMADIVDYELDRTGKYVPAVVSGTYSFLDKIISSFGALIASASVALIGYTSTMPQPGDECTTGVLVLTIGLTYALPMLGWICTLVAMKFCHLNREDMVAVQKRIAEKKEALKQQKAQMENVEITVWRKLNWNFYNKAYGEGENDAKSGNIMQNQEIFKRPVWKAIFSMGIPSLISVLVMIIYNMADMYFIGFLNDYTQVAAVSLIMPVFSIMTAVSMLLGNGGCTLIAQALGAGEKKRARSYMSLCIWTAILLGVIIAGLIIVFSNPLLKFLGTNEEMWQYARNYMLILAVGSPAMLLNYTIACLVRGEGVIKPGLIANFVSTGMNILWDPVLILGVKMGVSGAALATVLSNVIGIVYLIWYKMHHEMILTFNPKPARESVRHLGRVFALGFPNAISNILNGFASTFSNQLLVLYGTSAVAAMAAAGKATMIVGLLQMGLCMGVQPLMAYYYGAGDMRRIKEVVMKLFILTLGIGVVFGAVGMLGSKALVGLFIRDLEVVELGQKIVCIQLLSAPFAGIYYIGQNFMQATGSALMATITSVLRQGVLLIPLLYIMNAIMKMMGIPTAHVMADFISIVVTSVLTVIIYKKVKNQLKQKREAMKYFCNPVNINYRYQFNMDPREGALKVAREAADPSMIYFKGKYYIFASMNLSVWVSEDLAHWESHRLPENLPLYDYAPDVRVMGEYVYFSASRRGEVCNFYRTKDILNGEYEEIPGTFDFWDPNLFVDDDKRVYFYWGCSNTTPLWGVEMDPKTMLPLGERQVMIEGDAFAKGYERAGEDHCQWPLSDEEIEIRFQGFLKMNHQTEEQLPKELVPLIKGMLSQKPYIEGAWMDKWDGKYYLQYACPGAQYNVYADGVYIGDSPLGPFTLAKNNPFSYKPGGFLPGAGHGSTMEDTAGNLWHTSTMRISVNQQFERRVGLWQAGRDADGELFCNQRYGDWPMEVTGEKQDPWENPKWYLLSYGKQMTASSCEEGKGPEKAADENVQTWWRAASEKPGEWLQIDLGKNYDVRAVQINFADDKIDIPVPGKIKGTQTQPRYIEEQDHVTRWILEGSVDGEHYEVLENKSQAETDLPHDLVVMEEGKQIRYVKLTILEIPYDQKPCISGLRVFGIGEGAKPEVPEFEAVREGDVDMNVSIKENGAMGYNILWGHAPEKLYHSYMVFGNTKKVGALVKGQDYWVRVDAFNESGITEGTVKKLMPKLFATGNSEISSREKRNMERARKVASQGMVLLENKGVLPIDKSVKTIALFGNGARRTIKGGTGSGDVNSRFVVNVEQGLEDAGFSLTTKAWMDTYDTQVETARMGYFGELQQEMAAKGMAAVMKIFTEPFVEPAISGVSQKEIDAMKADLAIYVLSRNSGEGKDRTPGAGDYELSDTEKTAIANLANAYGNLIVVLNVGGVIDTKFLRAQEGIGAILLMSQAGNIGGHALADVLTGKVSPSGHLTTTWAENYEDYPNAKTFSHMNGDIHDEYYEEGIYVGYRYFDTFDVTPAYPFGYGKSYTTFDVKTEEVTADAKQISVKVCVTNTGATYSGKEVVQVYYSAPTGKLEKPYQELAAYAKTKELAPGESEELIITYQVDRMASYDVQRASYVLEAGTYYVRVGVNSRATKVSAAVVLDQETVTEVLSNRLVLDCEMNELSSADVTPYGYAEEEAEKEQACKLDIASTDIETKTVTYEETNAEIAANTSEKKITMQDVMSGQATLDDLVGQLTIPEMAELCVGTSRGNMGGDTAIIGSSSAVVPGAAGDTTSLMIEDRDIRNLVLADGPAGLRLSKHFKADAEGNVIPGTSDAPIPGMDLLMAGSPKPEIPEDAIDYYQYCTAIPIATLLAQTWDVDAIKECGDIVGEEMKEFGVTLWLAPGMNIHRNPLCGRNFEYYSEDPLVAGKCAAADTLGVQQHAGVGTTIKHFALNNQEDNRMHTNAHVSERAAREIYLKGFELAVKEAKPMSIMTSYNLINGIHSANNKDLLTAITRNEWGFDGIVMTDWGTTGGMEMNQGMEFKYGCSSAAGCIKAGNDLTMPGKQEDVDEIIASVGAKDGDVVCPITLGDLQTCAKRMLNTIMKSSAYMEMAVKAIQLIQIGTAMGSEEKARETIRLMKEAGYDGIELNGFMMKKMPPIVRVLTTLAGMPIGKTAKLDWKKLIADTGLKVVSIHEDLGSILRNPQEIMEEAKTFSTKYIVITGMHRFDYSNMAAVLELAQKLNKAGKILKEGGISLLYHNHNCEFRKVGAGKCAYDVLIEKTNPEYVNFEFDSYWATEAGVDTIALMERLGERMKLYHINDRGTRMSGPGGQILKSDSMELGYGNMNLTKMVEIAQKSGVDAVILESHKNWVDKSPVKSFQLSAKFMNEHVKNMKKQKFNHDWIFTVGSGSSLDALAGGNNTAKQVTLPRDASIGRERNPEEPNGSGNGFFREESYVYTKTFSMNADDKDKNVYLEFEGVYQNAFVYVNNSFAGKCPYGYSNFYVDITKYLNYNEPNALKVVVKNGVPSGRWYTGGGIYRDVNLMIADRLHLVPDSVQLAAIEVEDDQAIIRAKSTIAYTGIGIREIALCTELMDAEGNVVAADEMPVMVEEHSEQEYQQKMYVPNPNRWDAENPYLYTYRTYIKENDSVIDEETGTFGIRKLQLDTKHGLRVNGKVIKLRGGCIHHDNGIIGTAEFTHSAEERVKKLKETGFNAIRSAHYPMSRKLLEACDKYGMYVMDEYSDVWVSTKVEFDYSTQMTEWWEHDIENLVKKDYNHPCVIMYSIGNEIPEAGNKFDVQWGKKLADKLRSLDDTRYTTNSLNLLLAIMNDLPKLMAQNAAAQAAANTETDQPQEINSMMNNLGAMMAQFMASDFAAEKVKEACAQVDITGYNYAAARYEIDGKLFPNRILVGSETNPPDLDKNWELVEKLPYVIGDFDWTAWDYIGETGIGKINYTDQQSMGFYAPYPCKIAYCGDINILGNRRPISYWRELIWGLRKAPYIAVQLPQHYGEPQSTTQWSMSDAVRSWNWNGYEGKPVKVEVYAAADEVELLINGQRVERKKVGETKKYITIFDTTYHAGKVEVIAYSDGKECGRDEILTASDEVVIAAKADRTQIPADGSDIAYIDICMQDALGILNPNADKAVSISLDGPGEIMGYGSADPESEENYYDMVAKAYEGKLRAAVRGTGETGKIVVTLSADGLESVKVDVEAVMDFKSVEGKVAIVTGASRGIGEAIARCYAANGMKVICAARSVEQGQAVVNDIINNGGDAIFVQTDCSDGNAIKDLVDKAVVHYGRLDGVVSNAGIGMGGSPLHEYDLDDYEKIFDLNSKGVFAGMKYGAEAIFKSKSEGGFLINVASIAGLMPQRGQALYTATKFGVVGMTRVAALDYAKYGITVNAICPGYTKTSIFGDAPEQAMDFFANDCPAGRMGDPMECAYLALFLASDMSRYITGAAIPVDGALSAGSKNVTSWKHPEILTGGKLNADSTIAAIMENTDAKAIVDKYLPGFAENEQAKAAYGMTFKALAPMLGLPEDVVTNMLGELEQLMYSETKSREIELEMGRVMWEGADPNVMPFQFIEKYVLRLSEKMIAERKSKAPCRKFTGSSFNAVELAASPSLELAYIVAAPRMAYYMTYSTRIYDIYLKYIAPEDMHVYSIDEVFMDVTAYLSTYKMTAHELALKMIRDVLGETGVTATAGIGSNMYLCKIALDIVAKKMPADKDGVRIAELTERSYRKLLWNHTPLTDFWRIGNGYAKKLMENGMFTMGMGPTTIAEIRAYKPQNNSVSSRQVLHCPIQQRKQSLLMPYTAEKAKLIVKEMTDLLVLDLVDKKLLTDQMVLHIGYDIESLTDPEVRRKYQGELMGVSGYNLAVSLVWFLALMLGTGVLPHVMDITINYGSDTYWCRGGIFVNLCIVFLIILTITGFGYTISYKIVEIKCIHLDGGLDGAMEVNDAAMNANLKGQIAKAAGGAYVDTKALTGPMAILSRYCVQNGVSIMNSRVFKWINRACIAAQIIFAVACFCIFIQYMGKIIIHKSLLGHIKIDGSFIDDKVKELEMASGIYDIVGGTDCDSSYNTESYQHGSKSSITWGIHEKVKIDDKSVCHVHVKRKLSFLYIVPVIKVKYESNEVLMINVGIGYDEMPESSRVYSADTWAWESDKAIEIGENALLISIKRKWHLFRPVTVEAEIIKMEGNVSIEIAGERRPLQYGDVVLIPPEVAHHVVIHDVEMPYRRFVFWISKEYANQLMQLSQAYGYLMQQAAVTGKYIFHNDRISFNAIQTKVFRLIEEIHSNRFGKEAKISLCLNDLILHLNRTAYEQEHPKSQKEEQNLYENLMDYIEEHLDEELTLEKLAGEFFVSKYYIAHIFKENIGLSIHQYIMKKRLSVSRDAILTGYKITEVYLMYGFKDYSSFFRAFKKEYGISPKEFREMNSVDVNEFTNKIMKAIKLRTEQKVNPIGIDGKEQFLSWICEDGISQSAYQIKACTGDQTIYDSGKVASQDMHHLLELNLESRQRVCWKVRLWDEKDEAGEWSEEAYFEMGLLSDEDWNAQWINPELSKLTTKEYDCSDAINAQAKREWETREIEGEYEVHQPASYLRRVFSAPEGTMKRFYITCHGLYEAWLNGKRVGDAVLMPGSSNYNNELIYQTYDVADLLREGENELVIVLGDGWYRSTSGVDGDRGVFGQELGLLCQLEVDGESVLVSDETWEASQAGPLQQNDMQQGEVYDARKETFATENGVWHPVKTEDFDKNLLKGMNTVPIKEMENFEGKLIQTPNGETIIDFGQNLAGYVEFTVFGKDGETIVLTHGESLDENGNFTTENFQDRKRHKEGGTYQMISYICKDGENHYKPRFTIMGFRYAKVETILDLSDATFIAHAVYSEMEETADFTCGNADVNQLVWNSKWSQKGNFCDVPTDCPTRERAAWTGDAGLYVDTGLMLMDSYNVYRKWLAQCRYGQYPEGKVANIAPPNSKGSFMTAMLAGSVGWGDACIIVPMAMYRKYGDVRILEENYEMMKNWYAFLESRAENNAIQSGIDYGEWCEPGTNPMMSMQNGNFDVATAYFAHSGETLSEIAAILGKEEDAAHYREVSENAKKAFEEIFTKDGVVESERQCQYIRPIQFGLVNEENCAKNAEKLNELVLANDYHLNTGFLTTPAICGILCEYGYEDTAFKLLLQESAPGWLYAVKKGATTIWETWDGINEEGKPSESLNHYSYGAITGWLIGGVCGIQQEGRKITIKPIACKELSHAKAVYDSPVGTIESGWKYEGNKITFEFVIPVNTVAEVVLPNGERHELAPGVHQFMHDVRTFLSRNDKQISKSIKRFFTRFHVSSALKASNAYKKKGVPVMEIFQYLFLLIFSNRSMYMNLITGRNTPDFAKDTVYRFMKMIQINWIRFTTILSTRIIRDAILPLNSEDRANVLIIDDSMFERNRSKKVELLAKVYDHAKHKYRFGFRMLTLGWSDGSTFLPVNSVLLSTENRKNRINEATEVDKRTVGYKRRKLSMEKGTQAMLTLLDAARKATISAKYVLFDSWFSSPSTLHAVKSMGYDVIGMVKKTPKMFFRYNGEDMSLTSIYNTNKKRRGRSRYLLSVMVDVVKDGEIIPAKVVYVRNRNKRKEYLCLISTDVNLDENEIIRIYGKRWDIDVFFKVCKSYLNLSKECNSLSYDAMTAHTAVVFTRYMMLSLESRESNDNRSLRELFLYFSDEMSDITWIQAFQMLLQMFRTMLLDNTELSDEKINEIQQQKGGLSKMEREERIRHQKEFLIKFAYWAVWGGLVLAAVKMIGPVLLPFIAAFFVAWILSFPVAFATERMHIRRRIAAVAVVLLFYGLAGLVIGFLGNRIMLLGQELLGEVVRFVSETIFPMMKHFCAWTAGLTGETVGGEVLRTAGTESAEAVSRAGELLTGMSGTLLQQVSGIAVNIPGMCFKLLLAVISTVFMELDFPQIMRFLEKIIPEKWKETVLAVKKGTFGTMGKCAAAYVFIFLMTFAELAAGLLLLRIEGAFAIAFLIAVLDILPVLGTGTVLLPWAVIAFAGGNARMGIGVIGLYLIITVVRNIVEPKLVGKQMGLSPVVMLPCMIVGLHFFGILGLFGVPLLASFLKKLYSDGYFSEKLSGDCQKKNMAEKIILTGDRPTGKLHVGHYVGSLKRRVELQNSGTFDKIFIMIADAQALTDNADNPAKVRDNIMEVALDYLSVGIDPAKSHIFIQSYVTELTELTFYYQNLVTVSRLQRNPTVKAEIQMRNFEASIPVGFFNYPISQAADITAFHATTVPVGEDQMPMLEQTKEIVHKFNAVYGETLTDPQILLPDNKACLRLPGTDGKAKMSKSLGNCIYLSESEADVKKKIMSMFTDPDHIRIEDPGKLEGNTVFTYLDAFCTDGHFAEYLPEYANLDELKAHYKRGGLGDVKVKKFLNNVMQEELSPIRARRKEYEQRIGDVYDILKAGSEVAKEEAAKTLSEVKHAMKIDYFDTPEFLEEQVKKYSEMENENVSKNFIEQMIDKDIEEGHCKVVHTRFPPEPNGYLHIGHAKSILLNYGLAQKYGGKFNLRFDDTNPTKEKTEFVEAITEDIKWLGADWEGRLFFASDYFDQMYECAVELIKKGKAYVSDLSAEQIREYRGTLTEPGREDPYSSRSIEENLKLFEEMREGKYADGEKVLRARIDMSSSNINMRDPVIYRVAHMTHHRTGDKWCIYPMYDFAHPLEDAIEGITHSICTLEFEDHRPLYEWVINEVGAQIIPDKNEMPPRQIEFAKLYLTNVVTGKRYIKRLVEEGIVDGWDDPRLVSIAALRRRGFTPESLKMFVELCGISKANSSVDYAMLEYCIREDLKMKKSRMMAVLDPVKVVIDNYPEGQTEYLDVVNNLENEALGSRKIPFSRELYIEREDFMEEPPKKYFRMFPGNEVRLMNAYFVTCNSFEKDADGNVTVIHCTYDPASRGGNSPDGRKVKGTIHWVSATHAVPATVRLYENIVDEEKGVYNEDGSLNLNPNSLTVLKNCMVEENLAGAKAYDSFQFVRQGFFCVDAKDSTPEQLVFNRIVSLKSSFKLPTAMNLLSGLEKFGLKAEDTTNLFAEEKKEVVGEDGIKQEAVPTEDSFLLDKAVRCAVCDKVFKTKMIKSGRLKRLESDMDLRPRYEHIDTLKYSVISCPYCGYTAITRYFEHLSSMQVKMIREKICVNFKPADNVEPTLIDYDTAIERYKLALFNTIVKKGKNSEKAYTCLNLAWLLRGKRESLDAKDPKMAEQIKECREQEEAFYAQAYEGFTKAVSTETYPMCGMDECTMDYLLATMAYHYKKYDVASKCIARILQSAAASKKMKDRAYELKERIVEEIKRSKAMIEIMMNLQGGAKAPLYEKIYEYIKSEITDGRIPRGERLPSTRLLAKNLAVSRSTVEMAYDQLLAEGYIQAEPCRGFFVCDIAELYRLRGSSVGETGQVHRPEKPVCLVDFSPYAIDTRSFPYNVWRKISRNVLLDDSEELLMAGDGQGEYSLRSEIADYLHHARGVNCRPENIVLGAGNEYLEILLTQLLGGNKTVLMENPGYPQAYHTFRNMGYRVVTVPADEQGLSGGTVRAAAPELVYMMPSHQFPTGSVMPLGRRLELLAWAAEQEERYLIEDDHDSEYRYRGKPIPSLQSVDGLGKVIYLGTFSKSIAPSLRISYMVLPQQLIERYRTVCGFYSTTVPRMQQEILREFLRDGHFERHLNKMRGIYRGRHDFLIGELKKRSWVLSVSGDHAGLHVLVEADTGCSEREICERAAAQGVKVSGLGEYALTKDGGGGRNHPVLLLGYGSLTEQEIQMGLTVLDSILDAQESGMKEKVILAYSGGLDTTAIIPWLKENYDYEVICCCIDCGQEEELDGLEERAISCGASKLYIVDIIDEFCDDYIMPCVQANAIYENKYLLGTSMARPLIGKKLVEIARKEGATAICHGATGKGNDQIRFELAIKALAPDLKIIAAWRDDKWTMQSREDEIAYCQAHGIHLPFSADTSYSRDRNIWHISHEGLELEDPACEPNYDHLLVLGVSPEKAPEEGEYVTMTFEKGVPTSVNGKKMKVSDIIRELNRLGGKHGVGIIDIVENRVVGMKSRGVYETPGGTILMEAHQQLEELVLDRATMEVKKDMGNKLAQIVYEGKWYTPLCDAVRAFVTSTQEYVTGEVKFKLYKGNIIKAGTTSPYSLYSESLASFTTGDLYDHHDASGFITLFGLPLKVRAMKMQEIGEKNKYEMQRFSCFGFLFSLIYIGFPYFHSVCFVHVYAFLFEIYVYFFTCFSVAYVVYMIKAGIIGATGYAGNELVRLLMGHKEVEIKWYGSRSYIDQKYAEVYQNMFEIVDDVCMDDNMEALAEQVDVIFTATPQGFLAGVLNEGLLEKTKIIDLSADFRIKDVAVYEKWYKIEHKSPQFIGEAVYGLCEVNRDKVKNARLVANPGCYTTCSILTAYPLVKEGLIDPDTLIIDAKSGTSGAGRGAKLPNLFCEVNENMKAYGVTSHRHTPEIEEQLGYAAGRPVVVNFTPHLVPMNRGILATEYATLTKKADGSLPSYEEIKAAYDKYYAKEKFVRVLPKDACPETKWVEGSNYVDIGFKIDERTGRIVMMGALDNLVKGAAGQAVQNMNLLFGFDEAEGLCLVPMFPMKETEPVIRVMTMDDFEAVHALWMEIHGFGIRSIDDSREGVERFIRRNPTTSMVAVAEGKIVGAILCGHDGRRGCLYHVCVQEAYRKHGIGQKLVGACVDALAAEHINKINLIAFKKNEVGNRFWQGLGWTFREDVNYYEYVTNEDNITTYNPMIKMIKGGVTAAKGFCAASTAAGIKYQNRQDMAMLYSEVPCAVAGTFTTNLVKAAPVKWDQKIVYESKKAQAVVINAGIANACTGEEGMRYCRQTAEKVGELLPVPKDQVLVASTGVIGMQLPMERICAGIETMVPALSGETESGHAAAQAIMTTDTHEKEIAVEVMLGGVPVTIGGMCKGSGMIHPNMCTMLSFVTTDAAIAQPLLLEALQADVCDTYNMISVDGDTSTNDTCLLLANGMAENPVISEKNEDYDRFCEALRTVNEYLAKQMAGDGEGATALFEVKVIGAETKEQAKIISKSVITSNLTKAAIYGHDANWGRILCAMGYSGAQFDPEKVDLFFESAAGKMQIIKDGVALDYSEEEATKILSEPEVTAIADIKMGTAEATAWGCDLTYDYVKINADYRSMDEKNMQEILAKAEVLIEALPYIQRFNRKIIVVKYGGSAMVDEELKRHVIQDVTLLKLVGFKPIIVHGGGKEISRWVGKVGMEPVFVNGLRKTDEATMEIAEMVLNKVNKSLVKLVEELGVNAIGISGKDGGLLKVEKKYSNGEDIGFVGEITEVNPKILYDLLEKDFLPIVCPVGMDDAYNSYNINADDAACAIAKAVSAEKLAFLTDIEGVYKDPSDKSTLISELTIDEARALIGDGFIGGGMLPKLNNCIDAIENGVSRVHILDGRIAHCLLLEIFTNRGIGTAILSEKEKRYYNEMNKETCMKEAEESILHTYNRFPVVFDHGEGVYLYDTDGKEYLDFAAGIAVQAFGYHNREYSEALKTQVDKLMHTSNLFYNEPITSAAKRVLKASRMDRVFFTNSGTEAIEGALKAAKKYAYTRDGHAGHEIIAMNHSFHGRSLGALSVTGNKHYQEPFEPLIPGIRFAEFNQLDSVKALINEKTCAIILETVQGEGGIYPATDEFLQGVRALCDEHDILLILDEIQCGMGRTGEMFAWQHYGVKPDIMTSAKALGCGVPVGAFLMTERVAEKSLASGDHGTTYGGNPFVGAAVDTVLKMMERDRITEHVKEITPYLEQKLDALVEKYDFLTARRGLGLMQGVVCEKPVGKIASAALEHGLVVITAGADVLRFVPPLIIGKEHVDEMAEKLDAVLAEMMKRLYKRLTAAGLVVVLGMTGMAVMNTAGCGSSGEGVSSTETGETAADEAYRIAPADLTLWYADDSYADFFTEAAVRYYAKTGKKVAVQYQDTIDYLGTIYDKTMQDDAFPDVYLLPGDNLEEAYLYGLVSVNQTDPSENGVLEKAVEAAAYEERVLGYPLSYDACVFIYQTDYFTEAPASLQAIIDYSNENEPAENVEYLLEWDVKDAFYDFPFVGNSVTFAKRGSDELDITYDDTLYQQDLEYFDTILASFSIDAEQVSEQHIVNNFREGRTLSAILDTDTLWQLNGYDYGLMQMPELSDTLSAATCASTDMIVVNDYTKDSAAAADFAQFVTVGMADELHGLSGHYSVIPSETPDTVEQTALDAYEGAVLMPDSKDAKNFWVTLEETILKYFMIRTWKKIGAGMILCIFMAGCGSQNEVYLETEVSQDTGNVQETEETEAGERLDILDVSGGEQTGSVDLPEVSGEEWAAEAALAPETTEDADKADRASGKCYVYVCGEVAEPGVYVLEPGDRIYEAVEMAGGMTADAGTCAVNLAESVYDGLMVYIPDSEEAAGMTGSMTLAGDGVVSAVGSLNPAGGSGAKAGGGSAEGTASESGEDGRLNLNTASLAELMTLSGIGQTKAQAVVNYRDAHGGFSYVEEIMNVDGIKEGLYNRIRDQIKVKMAKKVLVVDDEKLIVKGIRFSLEQDGMEVDCAYDGEEALKMATENAYDMILLDIMLPKMDGFEVCQHIREFSNMPIVMLTAKGDDMDKILGLEYGADDYITKPFNILEVKARIKAIMRRTAASQPRKEESKVIEAGDLKLDCESRRLFILGREVNLTAKEFDLLELLVNNPNKVYGRENLLNLVWGYEYPGDVRTVDVHVRRLREKIESNPSEPKYVHTKWGVGYYYSQNMSKFKKLTDFLKSLKCRLILLCILIGIVPSVLLRAGMLGSYENRAVSIRTSEILSQAKILANQIVSNDYLNNAESESAINVQLEQLSTIYDGRVMIIDEEFHIIKDTYNLDTGKTIISEEVIKSIQGEEISKYDSQNRYIEMTIPLVHVDPETENKRTIGVIMVSVSTDSINLNLEYLARNTLVMELIAIVAIIFAGTFIAIHLVAPFHAMAKSIEEIQTGYGDDALKIDAYTETRQICEKFNKMLGRMKVLDDSRQEFVSNVSHELKTPLTSMKVLADSINSMEDAPVELYQEFMSDIGNEVDRETKIINDLLSLVKMDKSAGDLNITNVNINELLEQILKRLKPIAEKQNIELVLESFRPVSADVDEVKITLAFTNLIENAVKYNRPDGWVHVSLNADHQYFYLKVEDCGIGIPEESLEHIYERFYRVDKSHSREIGGTGLGLAITRSAVLMHRGAIKVFSTVGEGTIFNVRIPLNYISMSREAYRWRKKLICLGLACLMFLSGSLAACGRQTEQSAYHIEYLNKDKNRLVEEPYEPSATDTDGMIKEFLAKLSSDSDNVDYRKPIPNDVEITNYSLDGVLLTLHFDEDYSKMSAVDEVLCRAAVVRTMTQIDGVDCVAFYIGDAPLTDAKGNLVGTMNQDSFIENPGEQINSIQNTTLTLYFSNLDGDGLVKEVREDVYYSSNISMEKLIMEQLLDGPKTKDAKSAIPEGTKLVSVSVVDGVCYVSLDEAFKNQDYKVNEAIVIYSIVDSLSELSTISKVQISVNGDTSGAYRDNFPLADMYDRNMDYVTGAESAFSETEEPTETDMTKRPLCLGAAGVLSGILAAAYGWSVFARALLACGVLACGILGGIFADGYRPGDGISTAERKRTAFGAGVFLLMFALGSGRYLEAEKSRQAYLGELQDGMYVTVQGQLAGKQIQKNRYVYELTSCMFRTDSSNFLQTEPVSCGGVLIYSDSDDCSIGDILIYHGEITLWKRASNEGAFDAKAYYFARGFDFAMEGPALDRKVCAKRQTAEALWQLGQRIKEVYLKTMGERDAGILATMVVGDREFLDAETKRLYQIGGLSHILAISGLHISVIGMALYRMLKKAGLPFGMAALAAAGVMYGYGGMAGWGVSVRRAVLMFLLFLGAQVSGRSYDTFCALAFAAVALLWKNPCLFWDAGFRFSFVAILGVVWVGQSISYEKKGMGALRGKIFAASAVWFTTLPLVAWYFYEIPVYAVFVNLLMLPMMGVLLGFGAAGGMVGLLSLPLAKGMLFPCRILLFMGKHICALAGMLPGAMWIVGRPQCWQIAVYYAFLGAGTCLLHRQREQREREKEHGRRAEQKSGGHPGVFLAALLLLAVLGVPRSGEAELDMLDVGQGDGCYLQTKEGYHLFVDGGSSNVGKVGTYRILPFLKYKGVKKIDCWVVSHTDEDHISGLREILSSGYPVEYLAVAEQMPRDENWEELEALAEDAGTKVVWLGRGDIWHFGKATFTALHPGEPEAAFGGQSVDKNEESLVLFYQEDDFTGVFTGDIGAAQEEEILTWLQKTKTGADVQKIDFYKAAHHGSRYSNSTGFLEALAPEIALVSCSRTNRYGHPSKEAVGHMQQAGSQVYYTMESGRLCVKKTDGQAVCRGYLEEKEQWWQMKTIDEDIRSGNLKQIYLLYGTEDYLKRQYRDKLKNALTAAGEDSGMGGMLSGGDGDMNFNRFEGKDINPKQVIDLAETLPFFAERRVILIENSGFFKNACDELAEYLAQPAASTYFVFVEEEVDKRSKMYKAVKNAGKIVEFATQTEELITRWVLARLKKEGKNITGSVMQLFLGKTGSDMGNIDRELEKLICYTMDKSVIEAADVEAIATEQTTNRIFEMVNAIAEHNQRRALDLYYDLLTLKEPPMRIMYLITRQFQILLHLRDMAGKGFDNQTMAQKAGIPPFAVKRNLTQARGFGAGQLRQALEDGVALEEAVKTGRMNDQMAVELFIIRYSAAKQKKMANIKSAKKRILVTETRAARNKSIRSEVKTAIKKVEAAVAANDKDAAKAALTVAISTIESASSKGVYHKNNAGRKVSRLTKLVNTLAMYQIRTDLALETQEKMQEDHVELKGVRFLEEKLSPNLTVSTVVIETENGAKTMGKPKGTYITIEAADMDEEDEDYHREVSEQLARVIRQLVRLKKESLSVLIAGLGNREVTPDALGPGVVDNLFITRHVVKEYGKYAFGKQTVNRISSIVPGVMAQTGMETQEIIHSIVKETKPDLVVAVDALAARSTKRLNRTIQVTDTGINPGSGVGNHRHALDEKSLGVPVISIGVPTVVDAATIVNDTMYNLVTALTQSQAFAAMGNSLEKLNDAEKYELIRELLSPNLNAMFVTPKDIDESVKRLCYTISEGLNLAFAGGCLHTTVMHVYRYQYKNYNRSHDKRKKRRRILPVTILIVAAAVILSGGVRLDPGELGFLLQEEIVGFFLPQACGQVQGTAELTIADRLFAHFFLLPEESGVSADYQTQVESDWSYEAILAREAADENYVDAATGEVIMTQEAAEQSSTSMPEGETKEQTQGTVPEAAEGQQAEAQTAQAEAQMEQQAETQAAQAAETQTAQAAQIQTALATEKVVVYPREKLNDFDYLIQNFYQVDSTTTINSSQLNADALLGKDLRLSHDASTPQILIYHTHSQEGYADSVPGDASTSVVGVGDYLTKLLTEQYGFNVIHHKGEYDVGDRDHAYSKAGPGLEAVLAENPGVEVVIDLHRDGVAESTRLVTQVNGIQMAQVMFFNGLSRTTAMGDIDYLYNPYIADNLAISFQMQLKAAEYYPGFTRRIYLKGYRYNMHYCPKTLLIEVGAQTNTVSEAMNAMVPLADLLNKVLTAQRMEQFLIDWEGPVLLWIQEHMRNDFLTPVLTFLTHLGDHGYFWIALTILFLLLKKTRKVGGLMTCSLLLNTLVNNVLLKNLVARTRPYEVVDGLHRIIEAQSDYSFPSGHTGSAFAVAVVVFLMCPRKIGVPVLVFAFVIAFSRLYVGVHFPTDVLGGALIGAVIAYLVCAVYQRKTGQKGSIWNFERMELRALNDFLAIAREENITRAAEQLHVTPPMLSRQSADLEEVPEVQAVLMARRKDSPQKAAMREMMRDYLKNNDISIKDGTDVNSIMRDMMSVLLEGALDEELDEELGYSKYDYRNKETDNSRNGHSSKTMHTSYGDMDVAITRDRNGEYEPQLIKKYQNTVTQDMEEKILSMYAKGMTTGDIESHMRELYDIDISDSTISRITDKILPIVKGWQERPLEEVYAVVFMDAIHYHVRSEGRIVKRAVYIALGIDMNGKKDVLGMYVGENESAKFWLSIMNGLKNRGVEDILIACVDGLNGFPQAIEAVYPKTEIQQCIIHQIRNSTKFVSYKDIKKLMADLKLVYAAPTEETALNELELFKDKWDSKYPKIYKSWHDNWATLSTYFKYPEAVRRLIYTTNAIEGFNRQLRKVTKSKTVFPSDDSLLKMLYLATMDITKKWTGHRQDWGQIHSQLEIYFEERLAGRNLMDNMIRIDKDYIEWLKHVKKRFKNTQIKASIKVNDELLRFYWSIGKDIVNMQAESKWGGAFFETLSEDLKKMFPGAKGFSTTNLRYMKRYYNLFGEILPQLGAELPEATNLPQVGAEIYAIPWGHIKLIVDKCKDEPEKAMFFVDEVIKNNWSRAVLLNFLDTNLYERQGKAISNFQTTLPAYTGDLAQEITKDPYNFDFIALNRDYNEKELKDALTEKVMNLLIEMGKGFAFVGREYPLPIEGTEEYIDLLFYHLNLHCYVVVEVKIKEFKSRDTGQIGTYINIVERPFQVLCKLQKLIMVLRFINSYGFLGFMTALPTTAEFITYESVYLPKNHFIKEESLSTESYLDYFYPFDKMDFHKKGVESSWSVSDKDGIAIALATGKNPQAVTMSFQKEYAERYDWLVKEFSDWAFTFTTSFLYYMDYDSLDEQTKKLYRQGMSAFGGISPTYHISLAENAPVIVWNFHSLLVMIQMCFSFMLTDSDCDMKLCKHCGRAFIASRKGNEFCSPKCKNQYNVYKTRAKKNKTDEKENEGKSKKQAKIAGLNKFLQIYYARVIEIYKNIVMNEVKTPKKPLIFYYVMVFLLLMMLNFMAIPWMAERQVREVDYGTFMTMTEDKKIAKVEIDESEIVFTDKDGNIYKTGPMNDPDLVQRLHDSGAEFASQIVEQMSPFLSALLGWIVPIAIFMIIGQVMYKRLMDKAGGGGNAMMFGMGKSNAKVYVKSSEGIKFTDVAGEDEAKENLTEIVDYLHNPDKYREIGASMPKGILLVGPPGTGKTMLAKAVAGEANVPFFSMSGSEFVEMFVGMGASKVRDLFRQAKEKAPCIVFIDEIDAIGKKRDGNMGGNDEREQTLNQLLTEMDGFEGNTGVIILAATNRPESLDPALTRPGRFDRRVPVELPDLSGREAILKVHAKKIKVSDNVDFNKIARMASGASGAELANIVNEAALRAVRDGRAYATQADLEESIEVVIAGYQKKNAILTDKEKWTVAYHEIGHALVAAKQTNSAPVQKITIIPRTSGALGYTMQVEEGTHYLMNKEEIENKIATLTGGRAAEEVVFDCVTTGASNDIEQATKLARAMITRYGMSDEFDMVALETVTNQYLGGDASLACSADTQAQIDRKVVELVKKQHEKAAKILKDNRAKLDELAKYLYDKETITGEEFMSILNAQDGQTAENMNEEMTPDYMTGTPNTVCADARRQFSRIGLMFLVGTALIYGVQFGASAIANAINPDLLSSTSYALLIVMIPMYVIAMPIMALLIKRIPAVTLPKKHMTFGQWLIAFLMCYGAMYVSNYIGLILTQLISILKGSPVTNTMLEVATSSNLWVNLFIMVLCAPVAEELIFRKLLIDRLAQYGEGVAVLFSGLMFGLFHGNLNQFVYAFVLGLCFGFIYVKTGNIRYTIGLHMLVNFLGSVLGVAILKWLGDDFLSIASDPAGMMSYMTGNFGKLIVYFIYIFLLLGVAIAGIILFIVNLKKIRFLPGMNTLPKGKRFSTTVLNVGMALYMIVWIVIIIVQLFQMPKKPGARASVRRRLWRLCDICGTKSHAFDNFTCQNNYMFDKMRKLWITGCIVMICMGMLTACGGNKTEVVPIGDTEEADREVPYAMYINRVEGGKASVTISNYTDEEILYGTDFHLQKYIGSDWVDVSTLVPNYKFNEGVYSIPAHSSVVTDVKWEWLYSTLTDGEYMLTKTVLDPKEDGTYDQATMYVTFVFGTPMAYEKSYAFLHVILFYIRIRKRNDVAPGMQCFSEYNIMVQKIKDFILKDVQSENETKKTAVTLRISALMLCLYFLTLFAVFCAIKDIRSAVICLVCIGCYLVSFYTTYLNHTKFASIFSQALMALWILIFIWEYGWNCGVQHFVFVLLVLNFTVSAGTMGMKIGAAALACAYRIFLYAYTNRYDPVTNISADTGVLFQIINTLAIFGELTAIMIVFTKDSQEMEYKLVKYNEKLEHMASIDPLTGLYNRWSMRSYLEKIVGKYASGEIGYVSVAIGDIDFFKKTNDTYGHDAGDMVLKELAKVFLEVMGKEGKVCRWGGEEFLFVFQNKNGDQANEVLHDILKRIRGMGIPYQSDWIHVTMTFGLEEYSGEKDMEAVIRAADQKLYRGKENGRNQIVYMLTETIAIQVEGSLPGARLCIYIQEKSRELRIKERPLILLCPGGGYEWTSDREAEPMAVQFLAMGYHVAVLRYSCAPAVFPTALLELAEAMKLIHAHAAEWGVKEDQIYVEGCSAGGHLAASLGVFWHESWISERAGVTNEILRPAGLILCYPVITSGEYAHRGSFEALLKGQKTEEMLEKVSLEKQVTEHMPPVFLWHTFTDDCVPVENSLLLIAAMRKVNVPVEFHMYPAGGHGLSTCTEQSMNVDGYGVQEQCQSWLPLVRTWLAEKVRCKTDTNVLGMKEQMTEKKKLEDVTEVQMKYQKEIEAIVRGMSSPKVMHDRLLDYHENDIAAALEDMNPTERQRLYRILNAEEISEVLSYIDEEEIPSYLEEMDMKKKAAVVSEMDADEIADLLRQMDKKERETLTELLDEEVRHKIDLIDSFDEEQIGSRMSTNYVEIPSNVTVKQAMRELIRQAADNDNISTLYIVDENRIFCGAISLNDLIIAREDTNLEDLIVVSYPFVYATEEIADCIEWIKDYSEDSIPVLDEENRIIGVITSQDIVEVVDDEMGEDYAMLAGLTAEEDLEEPLKDSIKKRMPWLIVLLGLGLVVSSVVGMFEHVVAELTIVMCFQSLILDMAGNVGTQSLAVTIRVLMDENLTAGQKVHLVFKEARVGLSNGLILGMMSIILIGCYIYFFKSGSLQFAFAVSGCIGAALILAMLISSLVGTLIPMFFHKIHIDPAVASGPLITTVNDLVAVVTYYGLAWLFLIEMLHYMWKCRWTFVGEKCEHFFRLNVCIGFRVSSTFGQSDGCMSDTPETMGGLSGVPNGTSSQTIMTLYDELVARGLIAQVTDEEEIKELINNGKATFYIGFDPTADSLHVGHFMALCLMKRLQQAGNKPIALIGGGTAMIGDPSGRTDMRQMMTPETIQHNCDCFKKQMSRFIDFSDGKALMVNNADWLMDLNYIDVLREVGAHFSVNRMLTAECYKQRMEKGLSFLEFNYMIMQSYDFYTLFQKYGCNMEFGGDDQWSNMLGGTELIRRKLGKDAYAMTINLLLNSEGKKMGKTQSGAVWLDPEKTSPFDFFQYWRNVSDSDVLKCIRMLTFLPLEEIDAMESWEGAQLNQAKEILAFELTKLVHGEEEAAKAREASHALFAGGRDSAHMPTVELSAADFADGDLDILALLVKTELAPSRSDARRAVEQGGVSVADAKVTDIKTSYSADSFGADGLVVKRGKKKFVKVLVKMIAAVSFSLNTIVVTSFLIFFYAGIIGKKFRNYTQYLFSGMEKYSRYSKEAKDPVLVNLFTDLHKKEQQHFDSLGQVLNGTVPNCNCNDSDGKNYNPTATYSLAESEDKKNDCFLATDCIGTEKLVSSEYNTDVFVFADPGVRKLLADIQVEEQNHAEMLYKYKTVNSMSMSVTINDVANEAGVSKSTVSKVLNHWTTISPATVEKVHAAIEKLHYTPNSRAVNFAKGATSNIVYLTNLEKDTAYRNPHMFDIMCGVHHTLSENNYSLTLVNTSEEHYPGEKVSEVITSRSSDGLIIHGSAINKEIANLILDAGFPHIIIGHPSFESCLCWVDTNHALAGEYAAAHMIACGYTDVAFIGERKTDYISAQRQKGFMAGMLDRGFHIPAARIGNTDSSWQHTYSVTSDMLTQPVPPRAIVCENNTLALGVIQAVKDRQLSIPDDIAILTFDVYPYSSIIDPQLTIVDINVYDTGVQAGSMMIRKLQNPELLIQSYTTLPVIIQGESTRPLTMKKRVLSLLLCTAMTIGALSGCGKDAGKDEGQTTEVFGNDAGDEMTEVKIWHDGDENIMQTIADCANEKLAEDNIKVTFEKKSGLTDQLQLYGNDESNGPDMYLYAHDSLGTFAEMGILAPITDVISEDVMADLLPMTVEAGNYKDTQYLLPVYYETLLFMYNKARWEGDVPETTDELYDYMVAHTDVDAGTYALVNQHSTAYNVAPVINGFGGYIIDKDADPGLNTKETKDAIAYNQKFAALEADGDYNTVTALFNEGQAAAIIGGPWLVSGIKAAGIDLGIKSLADFKLPNGNGLAPYSGVQSIGVLKYAAENKKEAIAKALETIASPEVGIALANKSNCAPANSKAYDDADVAANEMIMAMKATAETAQPMPNIPQMSVMWGPAEAFLAAVNKSGEDIDTAAETYQQEALDAIADMQMKIKRKLTPWLYSMPALILIGMVIVFPIIYTGYISLTNMNLFHWSNYEFIGLSNYSRALLKADSGFLGALFTTLLWTALNMVIQVVVAYFIALGFQGEDFKGKRVYKTLLMFPWAMPAYVSILLWRVGIYNTEFGLLNKILVALGFGKVNFLSTNVPAFLSCMTLNLWMALPFMIMMIDGALSSIDRSYYESAELDGAGFWSKNIHITVPAMKGIIAPAVIMTTFTTFKQFDIVYLLTMQKGAYSGATLQTVITYAQQNAFVSNNYGLSSAVSMIIFFLIMVFSLFTNRGVKEKNYDMTKKKRKQILQRSGLHIFYIILCLLALVPILYALNLSFERGSGALSSGLSLFPKEFTLDNYKNILTQKPFLRWFYNSAVLSFFTMVIAIGFAVVSSYAFSRYRFKGRNGILKLLLLLNAFPQILSMFALFRLLKQMNMLDTKLGLVIIYAGSMCIFSIWNMKGYFDTIPVEIEEASKIDGASDFQLLWKVVMPLARPAIIVTSVMVLIFVWNEYLFSTTFLLNENSYTLAGGLYQLQSSDYTRSWGMFSAAAILVSVPVLIIFFCIQKYMVSGLTAGGVKGMEKEAILHIPLSQFAFAEKEDRLVIRIRCKKDDLKRCVLYWGDRVAMEEPLPVKQSEMEHVASDMLYDYYEVKITSPYTRVCYYFRLEDDTESLYYYGRGFAEKLSCGRAEYFQFPYIRREDILDIPEWAEDIVMYHIFPDSFANDRRELKEKATRHMLLPDEKSDSNGKILPDRICKNHLGGTLKGICENLDYIEKLGINCIYLNPIFEAASYHKYDTIDYFEIDPCLGNKVDLKELVQQCHKRGIRVILDGVFNHCGADFFAFRDVRQKGKASRYYNWFYYLPETIQYADPPDYEAFAYVKEMPKLNTGNPEVVEYLCNVGTYWIREADIDGWRLDVANEINHEFWRTFRHAVRAVKEDLFLIGEIWEEAGIWLQGDQFDSTMNYTFSYLCRDFFGKGELSVSEFDAQMQQMIYRYPWQVSLAQMNFLDSHDIPRFLSYCNGNRKRMELAFFYLFMGVGVPSVFYGDEVYIEGMKELEYRAAMDWQAVMEQQIENNRLQGNLAEKFSCWIVLRKEHVALRKGNYRTIYCNDITGAYVFSRSFGDDKVLIFLNTGTGSVTLTSVEVPQLQKEKIILSSYEGKLLAVLMEKVYFSKEISPEKVLEMYQLLGKKLDGKVAIKLHSGEAGNQNFLKPEFWKPVIDYVGGTVVECNTAYEGERNTTAKHKKTLEAHGWSRYFKVDLLDAEGPDLELAIPNGKVIQKNFVGKDLADYDSLLVLSHFKGHPMGGYGGALKQLSIGIASSAGKAYIHGAGKPEDIWTADHDSFLESMADAASSVVDYFKGNAVYINVMKNMSVDCDCCAVAEDPCMEDMGILISTDPIAIDQACLDLVYASDDPGRDHLLERIESRHGVHTIEAAAALGFGTREYELITVAMASLKKDTAYYHLPGLFEFYELYSVFLPLFYEHREYFYDWCDIGSIYGAPADCLWGGGRVGFGDHDPAEVLALLREYGISARLTFSNSLLREEHLSDRKCNALCVLFEEGGDQGNGVIVHSDLLLAYLKQQYPGFYFVSSTTKVLTDFEDLRGEINREDFRYVVPDFRLNKAFAQWDTLTGWQRDKVEFLCNECCWFGCRDRKRCYEAVSRKNLGESGAEHHCAAPDAEDGYLFSKAMANSGFIGTDAIKNVYLPMGFSQFKIEGRGLGSALILEFLLYYMTKPEYQLHVREKIYLDNMLDLFMKLAEFKGKYIGDRAFYKRYLYLALPMIVQNAITNLVSFLDNIMVGQLGTEQMSGVAIVNQLIFVYNLAIFGAVSAASIFGAQYYGKGNHRGHMYSFRFKLYAALLVTGLTILLFLTCGDNLISLYLTDTAGNGATDVALGYGLQYLGIMVVGLVPFAVNQAYATNIKETGQTMVPMVASFVAVGSNALLDYLLIFGIGPFPELGVAGAALATVIARYIEAFIIIVWAHSHTGQNLYLKGAYTGFGIPGEELKAIIVKGFPLMLNEVLWAAGMTAVTQCYSVRGLEVVAGLNIATTITNLFNIIYLQLGSCISIVVGQYLGAGELEEAKDADNKMIVFSVFCCVIVAGLMLVVGGFFPQIYNTTEEIKALATSFIAVSAMIMPFCSFSHASYFTLRSGGKTMVTFLFDSVFTWIVVVPAAFVLARFTGLGIVSVYFLVQATELIKVVIGYRMVRSNVWLVQMVMSADYIYAATAAKYGDPLGPTYDMLRRTKNCREIIESASRPNENLDKRLTFDGFQAWYLERAGLLGEMKYAGMPMGMWMIFHKSFQRNLTEVLKYDEEESRKITALAKKKYRELIERLPEFEKADRFKMNIVNCAMLSAFFLNMPTQPELSDATKYYKKSMMTGMMQRFCRMSGKKKYSESDIKAMKDTAKLKAGDRNPYSWNMDFYEYEDGSGYEARFTSCGICRLMGELGLTSLIPAMCRLDYTMSEAGGVTDFVREYTLASGGPYCDCGYKKKMISRLQSEYTGRVAEIWLEGNLNAHCFIPAQYWRDNFELVKELLGQAEVYVYEDARQIQGFIGLNDEYIEGIFVSDEMRSQGIGKLLLDFVKNRKAKLSLNVYQKNIRAIHFYQREGFAIRCEGLDEATGEKEYVMTWENFYNQRMVLDFYYFSYQCLLNDNMIRLLNEYRDKIDINLYDISNNHLLAGEMKMFFPTLIVLDKKKRYYSPLRKSFLEQAANGIYPEEKPFLPTISRNFTKGIIEPLSLDKFDIACECCGDKTSENCKKKIEFLKQYELDIYGFIHKNGKGELVGGVEYLPAKVIPYDIPHDDDIAFLTCVYMTDAAYDYKSAPLMKLEKYLAGEYKRILAISDEKGVFPNGDLDFFISNGFQDEGVIFEDENYCRLHLVTKKLMAAERKTLTQLFVPICVETLFYMLSGMVDTLMLSSVSDQAVGAVGTANTYIGVFIIMFGVISSGMVAVMSQNIGAGRPGVAYQARQLGLMFNAVMGILMSVILAVFSGGILRIVSIAPALFEPAETYLKIVGGACFLNALIPIYSSYLRVFGYTKHSLIGTVVGNLINIILNSVFLFVFNWGVMGVAVATVISRVVNLMIVAGMGAVLIKAKQSPERIPSRKILAQIVKIGFPSALETALYNVAMTLIVRFMNQMDADGMNVTARSYTMQIANFSYCIGAALAQANAIMTGWRIGAKEFEECDRGTRKAVIYGLITATCFSAAFAMSGHFIIHIFTDDTQMINLVVKLLIVDIFLEFGRVTNLVYGQALKTSGDAIFPVIMGAIFMYLFAVGGTYFLGIHMGLQAVGAYIAMAADECARAVGMVFRWKSGKWKSKSLVELMYFELKENKPHGTKDDPFSTYHIENAGRSFQIPVHWHDEFEIIYVRSGFLTVSISGESYIGKTGEAFVVSPGNLHLMGSQSGTVDYYTFLFPLKYISFRTDDMLDEKLLEPLNSGHLMICPRVNDTAKELCEQLIEIYEAKNDESESKITTQVRTKIILLQFILEMWKKGFVIENDTSGRNTVEKEMVSYIQQNFTGKISLREFGEQFHLSEKYISRYFKEHFHITLSQYVTYLRLEHAKQLLQDTDIPVTDVAMQSGYQNVSYFIRSFQKAYAVSPLKYRKNNYSRMSAEMINNHKKVVFLDVDGTMVNDRGEIPESTKEAVRRAKANGHKMVVCTGRSRFQIYDELLELGFSGIVGAAGVFVIADGKEIYHAYIDEEHRKSVYDYLEGNGFLFCYQADDGVVLNRRSSEGILEIYRKMGMSEERLVRLTGNMHLTEEPWKNPRNEKLLYYNAPFPVAKVHADLEPYFDTVAISLEGMGEYAGEIGINGINKATGMERYLKAAGIAREDSIAVGDGPNDLQMMEYAGIGIAMGNAREEVKERADMVTSSIDDDGIYRAFETLGLLAMEKRKLRILTVVVFAGVLIFGALRQNSTGRGELGEIQVAMWNLGKVDNLQLSYEYRWKQNGSAGGETMHAWADMLTGDWISEHYTTDEDGTRLYLKQFCDGRNLYHYIDWSGEWEQILPQQRENTVIPDYEMVTDLGYDGTDVEDLERVTEDGAVEITCSFTQEYLEEAWENQVAQVEKSYAFYEKSGADENAVKTAALSVEQHKQAHYEDMTATYVIDENQILRSMEYQITLIMPEITQDLSGNKMLGKDRKMQITVTAEVDRYNQGGIANKVQQYKTLVQEYMEMDQTRIGTFIAVLRKEKGLTQKELAEQIGISDKTVSKWETGNGMPDIAYLSPLCEVLDINVNELLSGEKLPSEEYLGKAEENMKHLMQENQNNKNAGRWQGLVGIALLAVAVFLAFGLSQAKIGWYVDCPSIILIVCICAACVLFSGCRTKYEVVHFLRKTVLPAGLVAMVIMVPALLHSLSDPAAIGPNIAVMVLTLLYAAVAYLVLYVAETRMERRRKQNMECKVYKFAHISKKEKRKLRKAYYRKQWFDISISYLFILMSSGKAFLSLKNGALWVLVWYTCSLLLSCYAYVNQIEYNVGRKRAKHYSKKHPNCTLQKSVRFSPEIGGWNLLAIQFLCALPLTIGLGIFAFVYQSFFYETYMMKYKDFCIGLALDTYVLVFFLIYFNGFWSELRDIHGVKNKINAFLVTFPGSKCKNIIVHLAAIVICVFALRHYLLNEFSGLFNEVVRKVIGIVYILYMILPMKEIKDYFREISKTRRSMGREIYDIINDMAEVLNASQMQKLQEVLVKRLSENTVSDYLQTTNMDFLDMFLTAKHLEGCSDKTIRYYRCNIEKMLDTINIPVIKITTEMLRKYLVEYQTINNCGKVTIDNIRRSLSTFFSWLEEEDYIIKSPMKRIHKVKTGVIVKDTIPDEKIEILRDNCNNLRDRAMIDFLLSTGIRVGELVRLNIDDIDFSERECVVYGKGDKERKAYFDAKTKIHLLNYIESRTDNNIALFVSLNKPHSRLTESGVELRLREMGKKLGVEKVHPHKFRRTMATRAMRKVCRLNRYRKFWDMSKMGKTATLNIRVNPDVKENAESVLAQLGIPMATAIDMYLKQISLVGGIPFSIVLPKAANSVNADMMSATQIHQKLEKGYADIEKGNVEDAASAFVAFRERHMKQYKVEITKEALQDMEDIYNYIAIDLLAPDNAMGQYNRIADEILTLDTFPERFRIMDSEPENRMELRRMLVDNYSVFYTIRDERVIVTDVLYTASDIEARLRGELMVLLVVDVQKGIVDERLYAFEKFVSNIRKLIETAREHGVEVCYIQHDDGPGTGFSIGDDAFEVYSEFQPMPAEKRFVKTVSSAFKKESGLLEYLTAKGEKDVMVCGIMTDFCINATVEAGFEHGLHMIVPAYANSTLDNEYMTGEQSYHYYNEFLWPKRYADCVSMDRALALLKKAIEVMLINFNDRHAITVSGINNCPGKAICDGDLVLFTMKKTIFLLVLVLIMGICTGCGKENTEIENSCMKEQTTSESSENDEIHLDDELNIDFTCDYSEDIKEDVDDVVAASTSLQEELTNMEKVTQKYTPLAEAAQTQGEMNVAAHWLYTIWDTELNNLWSRLSSSADRQTKEKLLAEQRNWIDLKEEVTLLNIGSREENGSMYPLLQDSYLEEITKNRAYVLARELAKIKGEDFAMPEVSAKYGTFVDNQGTGDIYSSLITRQNWEGKDEAVISVYREGETEGSFVDHGNGELSFTSEDGSVKGMIKIDGWNGASFKVTETYGESPFSAGEEFEFPFAVMEKQKIMYDSGNELAAFAAKQINYHVMGYYPITPSTQIAENLDVMGAEGLHDIALIAAEGEHSAAGICYGASAAGGRVFNATSANGLLYALEQFPVQSGTRMPMVMNVACRTVSGPLCIKGDHSDVMYLLNTGWIILFADEPQKVYDFNLLGLKLAEAVRLPVAVAFDGFFTSHQKRKCLVFENDDTVTRYIGEKLSCDNPKVSAFAGTGTCGAAGELPYASVLDLAHPVSIGSYMNEPDVINNRYQLHLAMEAARNKLPELFTEYAALSGRELSLCGAYRHEDAEVLLFVLGSSYHTAMEAVDRLRKDGVAAGVITLYVLRPFPAKELRVLCHNASTILVADRQDSYGAGGGNMSLELKAALSSLPHPPRILSRIYGLGGKDFFVEDALALFKTALSPDAPAFDYYGVTAGTEASDAADSAGTSFSGTDAVTAVSHPAASINEDMISSASGRADRTIADQASGTSGKADQSMAAPAMQPQYFKPVTKEESSPGLTTCTFDPTTGKMKVSGGSVKDTTAMPMRVAPGHGACPGCGIPINVNLLLKGIEGNVVMLFQTGCGMVVTTGYPKTAFRVPFLHNLFQNGAATLSGVVEAFHQRQKRGEYPDGEITFVMVSGDGGMDIGMGSALGTALRGHKLIIFEYDNGGYMNTGYQLSYSTPLGAKSSTSHVGKTQYGKNFFHKDTPELMAATHIPYVATVAESNPADFIRKAAKAAAYSREFGTAYIKALSACPLNWNDKPNLERSVIAAAVDCCYFPLYEIERGITVLNYDPASSNKKIPVTEWLGMMGRTRHLLKEEYRSVTEEIQKEIDRRYARLKARAEHPLLMKNTLSLPVTNENGSYEIRLESIGGLGANLCGKMLGELGALSLSLNSLSFSSYGSEKRGSPVKAYVRWCADDRPLRVNSPVTRPHLLGIFHRGLIGTYPVLEGVTVDTKIVLNTPLSAEEAADKYHISIGELYCLDALALAMESHSRINMVMLGALVRASGFIPPEAAETLCRDTIGKKYPALIEANLAGLRLGYENVKMAQGDRNLAPLPDAPAERYAWGYANAPIGGVNPRIGSTVSNDLTASREGYIPLFIQEKCINCGLCDTACPDMVFQFAPGTYREKNCMVNRGLDYYHCKGCLRCVEVCPTSALVPALEKDYPEKPHFLPNQHLLPDAIRYQTVGANSWITSDSFTDEKRVDGGVVMTGAGCAHTAITGYLVVVCRIFRKKSYASAKKRSKIGKEFLQMDNMLQKIIDFIKKETVLTIATVLAVASAFWVHPGPQYVGYIDWRVLGILLSLMLIVAGFQSNGLFDAIGSRLLAKTQNTAQLMLVLVSLCFFSSMFITNDVALLTFVPFACTILQKCHQERLIVTVFVLQTLAANLGSMLTPVGNPQNLYLYSISGAGLGEFVGWMAPYTLVSGVLLLLVVFVLSAGKCRISLETGSLLQVSSASGRKKNGIYLALFALSLFSVARVLPWELMLAVVLIVLIFTDRAVFLQVDYCLLFTFISFFIFIGNMGNIEAVRSVLQSLVAGRELAVGIGASQIISNVPAALLLADFTHDLKNLAIGVNLGGLGTLIASMASLISYKIYAHNYNKTKGHYLLWFTIANVLFLAVLVLVYVFISMHGWENTAEARMENTTETRMGEMDMSDRKMNVESLRGTVCVLLSAVCFSTGGVLIKSIPWSSVTIQGARSIFSALVVGCYMLLRRQKFVWNKTVFFGAVCNTVMAFAFVAATKLTTAANAIVLQFTEPVFVILLMWLIFHKKPGRDAVFACAGVFAGIFCFFYTSLDAGAMAGNLLAILSGLAYALVMMQKKFRGADFESSLLVSCALSAAIGIPFYGQESEMSLHIWFFVLLLGVVQFGLSYVFLSRGLDAVSPVTASLTSTIEPILNPILVAVFYGETIGATAVIGALLVVGSATVYNVRQAKNAAMTCAREHRGSGCSLFLCNRKLRSYYIKKLPGDRTAAETKDVARATRRRRRILQAGFLFIPMQTEEILSAGIDIGTSTTQLVFSRMILQNTGGFGRIPQIKVVSKEVIYESEIYFTPLSSREEIDGERVHEIIKKEYEKAGVCPADLATGAVIITGETSRKRNAESVVRAIADVAGEFVVATAGADLESVLAGKGAGAADLSQKTGKRVVNLDIGGGTTNICVFENGNMVDTACLDIGGRLIRVKDGRVIYMAPKLQWLCDRLEIDLAEGGTAEPEKLRRLTAAMAELLAEAVHLAPEAAELSYMQTNHLLADSTPPDIVMFSGGVAACFGEEENLFRYGDIGILLAQAIRKNEAFRRAAVTDARETMRATVIGAGNYSMNISGSTIEYTTKPFPLKNIPVVKLPLEREEEIEKLPENMHRALLLYKEEQEKDRQVALAMKGLKCPTFAQVQRIAELIAGQYVRECGMGRHLILVLEEDIGKAIGQALHHRLKEKCSVICIDGISCGSGDFIDLGEPVASGNVIPVIVKTLIFNGMILKTRMLGQTYEFKDVKDVLAKASEKKSGDELAGVGAESALERIAAKEVLAQLTVADLTEHPVVPYEEDAVTRIIQDDIDETVYGTIRDRTIQEMREWILCDATDSGALMRASRGMTSEVIAAISKIMSNMDLILAGSKIRVTATCNTTIGTENVLASRLQPNHPVDDVEGVAASTLEGLSYGIGDAVIGLNPAIDTVDSTLAIWKVLGDIRDKYEIPTQTCVLSHVTTQMEALRTGQGSADLCFQSIAGSEAALSAFGINTGMLSEAEMLFREEGPAKGPNVMYFETGQGSELSSSAAFGSDQQTMECRCYGLARHYHPFLVNTVVGFMGPEYIYDTKQLTRAALEDVFCGHLHGLPMGCDVCYTNHMPTDQNDSETILTLLGTAGVHYVMGLPQADDIMLMYQSTSYHDVASIRQLLKKEPIPEFKAWLEKRGIWENGHLGPNAGDPSIFFKMSEKETACLRDITETDIMEYMQVEHPHNEKELWKMKHATPARIGIGRCGARYTTEAQLRFLAAHAAANDAVFNEVPEEVVKELGVFEVRTRCANKNEMLLRPDWGREFLPDARQKIAENCVHHPQVQIYFGDGLCSPSIKANIPDLFPTIKMGLEDKGITVGTPFFVRYCRVNTARTIGPLLDAEVTCVLIGERPGLLTSESMSAYIAYHARPDMLESEYTVVSNISRHGVPPVEAAAHIADLIAQILEKKKSGVEFSKAEMEKNEGGQLVRALGLKESISMTIGTVVGVGLFTCGSSQIGYVGSGIIVITFLSLLISIWPCLIYGEMSAALPCAGGTYNYAKRGLNRVWANLAGWHYIISVVGIGAGETLAFSNYFKILFGELGINIEGVDSRIIAIVLVLFFLILNFRGIEMSGKAQTGFIFFFWGCAVAWFLYMIPHIHLDYFGGIAMDSLPSFKEMMYIFGLVWWCYTGFETCVSMGAETKYPQYTLPRALKVSVFLVFAVNALFQWFLVGLVPHEFYHILAVADAPYAEGLRAAGLVGFPIILLCIGIAFGGDLSTINPGIAAPARYIYTMAEDGSLPKFLCKVHPKYKTPYMAVLVVGIINIILIATGSINYIASVSLISLAVCYMIGCLAYLGLKKHYPDMKRPYRAPAGTVGCYVTIAAYTIILIFADRIALLTAAVVTVAAIVYWALFTRKHENKIPSIEEEIGILEEPSPQEKAKMDKEYRIWKAGTILVTVIALGIYIIPVLFMRLYEGNILTCDKENRIAHYLLEDQGKILYCGDELPAGCVAAERVSTGEGALIPPFVDSHIHFASYATFHAGLNVMNARSNEEILQMLREHVKKTKEKLVIGFGASPYSVSDGHLVRRVQLDEVCPDKPLFLVKYDGHACVVNTVLLNEVRGKVQHLRGFHEDTGEMNQEAFFAVSDYITASLSTVQLVAHMQKALDDLAARGIGMIHTVSGVGFARDLDVDLERFFARGITNGMQMRVFMQTLDVNKAVKRKLPRIGGCFETALDGCFGSMDAALLSPYENTSDCGVLYYSDEKVTEFCKAANRAGLQIEMHAIGDKAFVQAVRAIKAALDDLPREDHRHTIIHACLPTAEEIAVCERYHINLAVQTAFIDWPQEPDCYLEQILGERAGRLNPIRTFCEHGLILSAGSDGPCTDPDPLLWMYKACNHSNPAESISVQQALRMCTYNGYYTTFDERERGSLEAGKIADMVLLDRNPYDIPKEELASVKVKQLYLRGQEYKKGNGGGAAQILRGMIKRGKCMEKQTLVWAHRGASGYAPENTLEAFRMAVEMGADGVELDVQLTKDGELVVIHDETVDRTSDGSGWVKDFTYARISRFNYNRTHKEGYERAMIPTLEEVYELLKPTGLTINVELKTGVVFYPEIEERVLDLTARMGLEECVWYSSFNHYTVQRIKELNPQAKTGMLYCDGIVNPVSYGALVVGADAMHPALYNLQYPNYMEDCKKHGKRVHVWTVNEEQYMRMVCEMQVDAMITNYPDVGRRIAAEYLDGTLTPELVRVIKKQGKQGMMPEDRSCAKEEKTAYAAWMAETVEPYLKEHGEKGYLKMEDGMSIAYRRYFLPDAGKCVVISHGFCEFAEKYNEVAYRFLQAGYSVYVPEHRGHGYSGREVDDPELVHVQSYDCYAADLARFVETVVSPGAEHRIVFAHSMGGAIAILALERYPQLFEAAVLSAPMCAMQTGKYPRFLAKLLAEFCCLTGKGKCFATLAGQQGFSETPQFEGSSCLSKERYDYMFQKRLLDEHYRTYGGSYAWVRAGLRASRKLMRRENLAKIKVPVLLFAAGRDHMVDNDAIARFAEETERTKLFFMPDSRHEIFNADERTRAKYYDEIFRFIKEEEVKDYENENEQTRKILGTVMSRLEKFWVLYDVGNSAFTLLMSTIIPIYYKNMASANGISASDSTAYLSYAISISTLIVAVLGPVLGAVADNKNRKKPLFTFFMMMGVLGCAALAIPRTWILFLAIFVIAKVGFSGSLIFYDSMLVDVTTDERMDEVSSQGYAWGYIGSCVPFVASLGLILGADAIGISGTVAMMIAFFINAAWWVVVTLPLLRNYQQKYYVEAGGTDVRGIFSRLGKVFAEIRDDKKVLWFLAAFFFYIDGVYTIIEMATSYGKDVGISDTSLLMALLLTQVVAFPCAILFGKLTQRFAASKLISVCIGAYFVVAVYALWLDAAWKFWMMATFVGVFQGAIQALSRSYYAKIIPKEKSTEYFGIFDIFGKGASFMGTMLMGITTQLFDTSRAGVAAIAAMFVVGFICFQMQRRCMEGETSQSGAMGGAAGFAKEMPNEDLLSEKLLQPMVQLSYAAAMDLVQARLRLINADLTEQCHRQVIRNMSCRIKTPDSVTKKLKKKGREVSFEEAVQTLNDIAGIRVVCFFCDDIYRIADAIKKQKDFHIIKEKDYVKNPKKSGYQSIHVIAGVPVTYNDTVTEIRVEIQIRSFAMDYWAELDTQMCYKKDAGQIANVERETRGYSDVIAKVDNKMLELRQQIEMMMKKKVMCMLLTGVMAAGMFAGCGSSDTADTTTDAAATTDAASTADAADTTSEAAPAENADFEHTSAIAVYSREDGSGTRGAFIELFGVEEKDESGEKVDNTTEEAIITNSTDVMLTSVAGDTYAIGYVSLGSLNDTVKAVKIDGAEATVENIKSGTYKIARPFNIATKGEVSEAAQDFINYIMSGDGQKVISDNGYIGDDSAAAFESNGAEGKVVVGGSSSVSPVMEKLIEAYKAVNANVEIELQTSDSTTGMTGAADGTLDIGMASRELKDSETEEGLTATKIAMDGIAVIVNQENPVEDLSSDTVKGIFTGGTTTWDAANMKKREKIMEYVFLLAAVISIVAVALICIFLFANGIPAMKKIGFAEFLTGTKWKPGNNKFGIFPMILGSIYVTGGALIIGVPVGVLTSIFMARFCPEGLYKLLKPVVNLLAGIPSIVYGFFGLVVLVPFIREHFKNSNGQSILCASILLGIMILPTIIGASEPTIRAVEQSYYEGALALGATHERSVFTVVVPAAKSGILAAVILGVGRALGETMAVMMVVGNQPRVPNSILQGVRTLTTNIVMEMGYATDLHREALIATGVVLFAFILIINLCFSAIKRSGKEMEQINPINKVTLKDKMKSYTRHPGSLILLLLVLIAAALTVVTLLFLVGYILISGIPYLKPSLFALHYNSDNVSMLPAIINTVEMVVVSLLFSVPFGVGAAIYMIEYARKGNKFVEVVRLTAETLTGIPSIIYGLFGMLFFNIALHWRYSMLSGAATLAIMVLPTIMRTTEEALLCVPDSYREGSFGLGAGKLRTIFKIVLPAAIPGILSGIILSIGRIVGETAALIYTAGTVTGVAGLMDSGRTLAIHMYVLSNEGLHKNEANATAVVLLVIVLLINGVSSLIAKRFEAVKEMGEKFNISNLNLYYGDFHALKDVGLSINEKEITAFIGPSGCGKSTFLKCLNRMNDLVQGCKITGQVLLDGEDIYSGMDVNLLRKRVGMVFQKPNPFPMSIYDNIAYGPRTHGIRSKAKLDEIVEKSLRDAAIWDEVKDRLKKSALGMSGGQQQRLCIARALAVDPEVILMDEPTSALDPISTSKIEDLAVELKKKYTIIMVTHNMQQAVRVSDKTVFFLLGEVIESGDTEKLFSVPQDKRTEDYITGRFGMRNRFERQLLELNNELIQMGSMIEHAIEMGISALVRQDVEKAKKAIAYDEEIDEQEKTVESLCMKLLLQQQPVAKDLRLISAALKMITDMERIGDHAADISEMTILMSDATYERSAINIDLVESMAKETTDMVIKCVDAFVNKDLELARTVIAQDDVVDDLFADFKQQLIKKINENVKNGEQATDMLMVAKYFERIGDHATNIAEWVIYSITGEHEKMDIFGVLSLIGGLALFLYGMHVMGAGLEKMSGGRLERILENLTSNPLKAVLLGAGVTAVIQSSSATTVMVVGFVNSGIMKLSQAIGIIMGANIGTTITAWLLSLTGIQGDNLFINMLKPTSFSPILALIGIILLMSGKSDKKKITGEILLGFVVLMYGMSAMSGAVEPLADVPEFTNLLTMFKNPVLGVLAGALLTAIIQSSSASVGILQALSVTGGFTFGTAIPIILGQNIGTCVTAMISAIGANKGAKRTAFVHLYFNMIGTVLFLCLFYLGNAIFRFPFTNDVVNAADIALVHSIFNVFTTLVLLPFTKGLEKLAYLTIPKTEDEKKTANDAFVILDDRFLSSPAFAIEQCRSLVSQMAEMTRDGFLEAMDVLGEYSEEKAQDVIDKENRVDVYDDKITAYLTKLSSENLSYKDSLQVTSLLHCITDFERISDHSINVVESVQQMRKENLTFSRKGEEEMNLYGAAIRDILTRTTDAFVNNDQALAHTVEPLEEVIDELNKDVKKHHMKRLRKGKCSMELGLILSDLAMNYERVADHCSNIAVYMMQLKDTQLEEHSFTEQLDEAESAEFTRLLDEFGSRYSLMATIYIVEDDVNIREIERYALKNSGYEVEEFESGESLFKRLERAVPSLLLLDIMLPDEDGLEILGKLRANKNTAAIPVIMVTAKTSELDKVKGLDLGADDYITKPFGVMELISRVKALLRRTQSAAEKTKICHGEIRMDNDKHAVFVGDEPCELTFKEYELLKYLMINAGIVLSRDKIMDQVWGFEYEGESRTVDMHIKTLRQKLGAAGSCIKTIRNVGYMIEMKKKLNSKFMLIAAIAILVTAVCSIGLFYSILVQQIYDDLKANAHVISRLDFEDASQEVCDQLSGDGLRITLIASEGTVLYDSMEDETKMENHRGRPEVERALAVGEGRGMRKSTTSAEHTFYYAMRLSDGNVLRIGKESGSIYHLAWNMTMLTLGVGLCVFLVCAFFAKRMTKRFVEPIEKMADNIVLVDEREVYEEMRPFVSMIKQQHVDILNHAQMRQEFTANVSHELKTPLTAISGYAELIASGMTNERDTEHFANEIHRSAERLQSLINDIIKLSELDNSDLRLEFEPIDLYALATTCIDQMQIAAQKNEVTLLQEGGSVTINGNKTLIEELLYNLCSNAVRYNKKGGSVTVITGKKNQRPALTVRDTGIGIPKEQQDRVFERFYRVDKSRSKSTGGTGLGLAIVKHIVVQHEAQIELSSEEGAGTEVTVIFMTAAGEIRRILPIAGSRDSIAKPAVSNHAVLTSAIVRVFPSFEHAMESVRTAKDNFKIFVQRLAHRMRTQSVECSKLGKTRIITDASCGMVRNTGFCGQNLPPHVYLELLSIYFSMNDSRELTLQERSTKRANYCLMLTVLIISIYMMFLFIGTILQGNHALFRLFVIAGMIALPAAVSTLFYFFNPVSIRYRNVALTCFLIIYEVSCLSSKLFVYNLFMIPILVALLMYFDLKLEICAGVLNMVCCILNGVYSVHVLGTNSLSETNMIFVICSIIIVINTITCLASRVAVLHNTEELAELEAHKKKQEDMMNSIVTVGTSVNESTQSIHALIEEMTEATGCVSQAMGDITVSMESTVASIQEQASMTGRIQDIIADTVSIADALTNISQSSGKNVETGQALVSNIVSQTGEVESENKLVKENMTALQAHTQDMLKIISIIQQISAQTNLLALNATIEAARAGEAGRGFAVVAEEIRMLSEQTKQSTENIEEIITKLNKNAGDTIASMDHVMDKIGNQVSMIHDIEENFSGIRSGLTGLEQNAAAISEKTRILKETNTMLVDETNTLSSTSEEISASAEETNAMCTDNAERFKSVNNVIAELAAEAGKMNGFIEEYHRLHDADTDAETAISRQALHTAMIQYTIHEVAALLNISTDAIRLYEKEGLVTPTRNPENGYRYYDTEQIHRIMGICLYRKLNVSIAEIKRLLAVSTLGDLSESFSGFIDSRKKEIGRLTLEVEKMSYMKQHLDTLDEGSRTISIRTLPAVYPLYHQDSAFLGYRTLKDVFHSPLFSMGNFSYILSVEPSGSCQVSAFQFAIREPMLALTKLNSTNLPSRDSCRCLYTVVAFPTEQEILWDLSAVLKYAGEHQLSCKPEAYAFYVFSIAQPDVILDYYEVYLPLEDSMYHKILFSSFFSFNFFVRIWYNETYLVIEILLIFYGGLSMFSVSDIKEDVYPAVYRRGKELYETGGVLDFAYDIYLEHDLPVAEVRAEVRGREQGSYRVTVIVDEEYGSVSSSNCTCEAFYNYEGMCKHCVAALLAYVNRRQAKDILAAKRTGHEVGEQGSAAEEKPAAPMQTAGAFKTLLNQYSLRAGVSYLIPESVYGKVELEPYFKMDYSYATVEFKIGMEQKYVLKNISAFLHSIERNEKVHYGKKLDFYHNRQAFTEDAWRMVEFMRMQDDDKKRQSRFHAYYAYTGGYERTMELDEVGIDRFFDAIGEMPLSAEIGYLPEEEYHVQEEERKPKLEIRAGASGVFLVLEDLHVIRGSRFYYFYEDGMIYRSSEALKAKAGDFFDYMERQTGGECYIAAEELPSFCRDLLPLLRETFRVTAEGFDETLYVPKKPEFELYLDKQDNQTVGAKLVAAYGDDKYNVLQKIEPGEVRDLGEEMRVRTLVEPYFNEYGLGQTIFILSHNEDMLYQLISSGLQRLSEYMSIYTTEDFRGMKVVSSPSVSVGVALKSDLLELQIHSDEMSREELAYLLTRYDRKKKYVRLKNGDFLDVREDGLGLLAEISEDLRLTESGLKKGHVNVPKYRAMYLDAALKSNQELSVEKNREFKGMVRNMKTIEDSDYEVPDSLRSIMRGYQKSGFLWLKTLRENGFGGILADDMGLGKTLQVISLLLSEQESAKAGEREWHRSLIVCPASLVYNWQKEISRFAPQIKTTLVTGLATERQRIVRHTKEGEVLITSYDLLKRDVELYRDMVFAIQVIDEAQYIKNPGTQAAKGVKQITAGFKLALTGTPIENRLSELWSIFDYLMPGFLYTYQRFREEIEIPIVVNGDENRMQRLQRMIRPFILRRLKGEVLRDLPAKLEENVFAKLEGEQLALYDAHVQRMKESLEGKSEKEFRSEKIQILAELTRLRQICCDPGLLFEGYKGESAKAQMCMELIENAVGAGHKVLLFSQFTSMLERLAAGLKKAGIDCYMLTGSVGKEKRMQMVESFNEDDVPVFCISLKAGGTGLNLTAADIVIHYDPWWNVAVQNQATDRAHRIGQKHVVTVYKLVSEGTIEEKIIAIQERKKELAKQVLEGEGMDSVSFTKEEILELLGMSTDRSDSLTWQILKNETHVYLWCYIADGDGSGAQRIYISLFFMCAPAENASSGLNVYVCPVAGAEMAVFIELLLIGVGLSMDAFAVSICKGLAMRRVNKKQAFVIGLFFGGFQALMPFIGWALGTQFESYITSIDHWIAFVLLAFIGGKMIAGAVRPEDENVEIDKLDPPLDLKEMLVLAVATSIDALAVGITFAFLNYPIGEAVTIIGLTTFCISIGGVYVGNFFGNRYKKKAELAGGIILVLIGVKILLEHLGFVGMTEMLWAAVLLVVGFVLLIKGADFFVEGSSSVAKMLKVPSIIIGLTIVAMGTSLPECAVSITASVTNNNALAVSNAIGSNIFNLMVVCGFCALFNPLYVEKSTLKKEFPFSVVCAVLLLVCGYLGMQLGRADGIILLIVFVAFLVWMVRSALKARAAAGDDEYEVLPVWKCIVFIVGGIVAIKFGGDFVVNGASTVAAKLGLSQNLIGLTIVACGTSLPELVTSVVAARKNELDMALGNVIGSNIFNILFVLGIAATISPITFIMENVIDIVILVAMSVLVWALAWTKKKLDRFEGIVMLALYVVYLVYICMRMEFFDKLSESLVSAGKDVSQKAKDVSEIAKLKLDIKSKEDYVQKQYEELGRSYYEKHKDEEGCEAAEQFFLIKEAVEEIERMKAEVLRIQGSAECPKCGAKMPEGAVYCSSCGTKMDDMYEEEMRKSSRYAAYLPFVLVAVIGLVYHVGMKPMAGDDIFFRDATKDTTLWAYLTQRYLTWTSRVVSECVLVNVIQCPVLWRIIDFLLFATLPLLLSGLFGGGKTMNWCAAAAVLIFPFHDMGTAGWITTTVTHFWPFWGFFYVAWVIRKLALAEKIHPAAAVSAVPVAVVTGSHEQYAVIMTLLLVLSGVYLWKAHRRPGNAVLFWTLAVIDVVSLLVIALCPGNAGRNAVSIADLPVYATFGFGQKLYLGLLSIERVFIANADVVFFLVVLIWTWLVWEKTKDYRRTFLSALPLLILFGQTVLRTAYPGLSGLFVMPGEILEWSWSDLSTWIPMVYLAVTVAAMIYALYQLFGDDLFTFISVLLLVGCGFGAGMVLGFMATIYVSGERVYAPLYGILLAVTLFGICRQRSVWKEPAAVSSAVFLTALTVVCCAVNVLFIVLSLMKVIEGIGVNGEMELNKEKKNIIGITQSGLILVLVVLIVFMMVQINRLQGTARVINYAGLVRGATQREVKLEITGNQNEELVQYLDDILSGLRYQDGHYDLIKLPDKEYQDKLQVQSDYWEKLKVEIEAVRSRGYENTDIVNMSETYFKMADETVSAAENYSEKIARKIRTIEILSALDMLCLVILVIMQTLMAMKMAVQNKLLEQRAYTDSHTGLPNKSACEKILNNKEIIDEPTACIMFDLNNLKTVNDTMGHSSGDQLIMNFARLLRSVIPEEDFVGRYGGDEFMAVIYHTSKAEVEDILKYLRKEKDRLNGNENLMSIDYACGWALSEDYKECTMQILLDKADSYMYDNKQLCKQHTLMLTIMERKKGESARDYVTRVLIDNIVNVHLEPGEKLLENDLSGQLGVSRTPYREAVLALAERQLVHIRPKKGTYVSHIDLKLVEEVRHLRSIVETELAVMACDLLTEEDLDVLRENIAIWKMYMERKQTDKILQFDKEFHRHFYEMCDRNYWYTLLESLSPHFDRTTVLSFRCRPVNGIVSDHEELVDAIAARDRGRAAETARRHMLRYTENIDTIRQAFPEYFAMELAIITAKQVVILYCLILAGFAGVKSGVIKQEAKKAFSNLLLYLAVPAMVIHSYISKADRSVLARLPQTFALSVLAILAGLAITMLCTCRMKGKERPILRFACIFSNAAYMGFPLIEALFGAEGLIYASVYVTVFNILLWTVGFGMITGTVKPKEVVRTVCTNPVLIAVVIGLVIYLCQIPVPEVIEQPLALIGNMNTPLSMIITGMMIAGSNLAQMLCDRRILSVVGIRMLLIPAVCFALFFACGFSGMAAGVVLLLEACPSAAITSVFAVQYSYDEEFAAGSVVITTLLSIVILPVCAMLLPGMMAEEPGDGMGSRQDKKKERVTWKSDVCIQKEIRMSFRRRWIAFLRREVQMRDSFQFLHGGLPSPVFTRWEGVECYNYSSLIYAADCENVTICGTGVLDGAGSAWWHWKKLQQNAADRLIRAESQGIVVEERVFATREDALRPSFIQFINCKHVTLEDFTIEDGPQWTIHPVYCEDVVVRGVTVNTKGPNTDGCNPDSCRKVLIEDCTFDTGDDCIAINSGMNEDGWRVGRPCEQIEVKNCRFIGGHAAVAIGSGMSGGICDIWIHDCVVRGTERGIRIKSMRGRGGYVKRINVERMQMDEIEKEAIEVSMNYGSSTAMPVSQKAPEFSEIRFAHIRGNHAAVGVSLCGLPESPLRKLTLEDVSIAAEDPLREEYVEKMTFRGFGANLRKVDTHKHEEEESTSADTLQRDFQLRGRSLLRGNEEGRMEDGFGVAGLNTGRYMSDKGKFYMTTAIAYTSGKPHIGNTYEIVLADAIARYKRLEGYDVYFQTGTDEHGQKIQEKAEKAGITPKEYVDNVAGEVKRIWDLMNTSYDNFVRTTDADHEKQVQKIFKKLYDQGDIYKGSYEGLYCTPCESFWTESQLVDGKCPDCGREVKPAKEEAYFFKMSKYADRLIEHINTHPEFIQPVSRKNEMMNNFLLPGLQDLCVSRTSFSWGIPVDFDPKHVVYVWLDALTNYITKIGYDADGNSSDLFKKNWPADLHLIGKDIIRFHTIYWPIFLMALDLPLPKQVFGHPWLLQGGDKMSKSKGNVIYADDMVDLFGVDATRYFVLHEMPFENDGVITWELVVERFNSDLANILGNLVNRTVSMSNKYFSGVVRSTGVTEDVDEDLKTVVTGARDRVAQKMKDLRVADAISEVFGVFRRCNKYIDETAPWVLAKDEAKSDRLAEVLYNLAESITVGASLLYSFLPETAEKIVAQLHTQLRGFEELNQFGLYENGTKVTGTPEILFARLDAKDVMPKVEAIREAQKKEFEAEQKALGEEAPAEEKAEDVIDIEAKEEITYDDFTKLQFQVGEIISCEAVEKSKKLLCSQVRVGSEVKQIVSGIRKYYTPEEMVGKKVMVLVNLKPAKLAGVLSEGMLLCAEDAEGNLALMTPEKPMPAGAEICMLKGDTGAKRTWFYENGAFVAAALAAVLWHVVLSTNVGDDMVYFKTLLDGNSSLGEILAHRYETWSSRMVIEAVLIPLVHCPLLWKILDIVIFTSLPVLLCGLLGVTGRGRWFVTGLVLLYPFADMASAGWIATTTNYLWPLWGVLVIGMVLKQLRCGRKVPVWEAAAAFLACAYAGSQEQAAVLLLLLLGMEVLHYISEKRMKQPLLYALCGIDIISLIYIFSCPGNAIRSAQEMAGRMPEFADFTFAEKLYMGLANVERIFIAELDPVYCVVAAVLVLLVYRKTGDYRKTLLAGIPALLLFGQAVVRVSHPFFEKVFVLPAQATSWNWGGAMTYMPLIFLVLSVFGILYALWQLADGAWKHYLWTVFLLAGGFATGVVMGFSPTIYASADRPYLYLYFVLIYVCTDAVWNLGGMRAVWKTGSADAAQSGSGAHSKGKMSVPEKLMFTVLGLLVLANILDVTRMCWLLGRLLMGISINAPGSVNSQASMTGTLSIRKSTNTFEQMAGVSSSGGTSKKQLNYNHRDISGQLLRAKKPQSASAALTRAKSKVSMLQRAAASGQYDSREVADALAHARRMVRCAQLKVRNLREEEREQQSAQKENSGKSQQKEHEVKRRVAQKERQLKQKVAIENTQEVLRQKKKKNEMAQKQQRHRSQERGKIAEADFKYIKSQLEAGKGFGGGSSYCEDSGFTLDISDAAMSMAELEMMAQNQTEAEAEAEVEAEMSLTDGGTLAAATAGAVPAGTGAGTASDTAPAAAGASVDVSVMSDTFREVSKRGRDTESDAKIRQEEMLTFFSNECSICISIMPVFKAFFAIAKKRRNAALIYLGVYAVITLLLSALSQDSINENFKASQRSIAITDEDNTDASRALCDYLASIHQVTTPEPGEDTALLDAIYYRTLNYAMVIPEGFEDRVLAGETKDLVSSLTIPGSSSSQYVDNQITQYVQALQLYLAGSDTIAEAIDHTDHTISDLPKVSVTSFQMSDADTNSMVFYFFQYLPYIFLAILFAGMAPILVTLNSRDMKARTACSALPGRTRTLAMASGCLLYSLGIWLLFLLLGLVFYQKAMLQPYVGYAILNSLAFLFFTAALSLLISTFSPDDNVLNMLANIVGLSMSFLCGVFVPQSMLSGSVLAVGRFLPAYWYIRANNMLAGFGKEVFDLGFYWKCIGIQFLFAAAMFALTAVAARQRKGLSLMFFHTMKYTLLNLLRDKGQVFWCVAFPLLLGTMFHFAFGGLGSGESFSAIPVAVVMQEESSELRSMFDSLSKPGEDQFLEVTYASAADAKELLKAKEVYGIITADLPTVSDYRNAASAKDVSTYPLSLTLSAEMTSDPLYQSILSVLVDRFNIEYSAIAQAAMKDPTKLPALLDAVSTEVSYIRHESLGAGSVDESLTYFFNLIAMTCLYAAMIGNTLAISNQANLSDLGARRNVSPVPRLLATLGDLTGALIFEFSSLLITIAYLTLVLKVDFGNHLGGVALTCLCGCLAGLSLGFLVGCIGQFSKETKFGFLMAAIMICCFLSGLMIGNMRALVEDFCPLLNRINPAALISDALYSLVVYPSYTRFFTNIAGLLLLSALFCLGSLALVRRKKYASLMSVPVVEIENLVKRYQELVALDHFNLTIEEGEIFGLLGPNGSGKTTTINCILALLAFDKGTVRVFGQEMRPDSYDLKRQIGVVMQNVAVFQELTVYENIDYFCGLYIRDKALRRQYVEDAIDFVGLNDFRKFYPKKLSGGLLRRLNIACGIAHKPKLIILDEPTVAVDPQSRNKILEGIQELNRNGATIIYTSHYMEEVEQICTRIAIMDKGKNLAIGTTEELKRMIKKSEIISIDILDLLPAQISAIRDIKHVYEVTFEHHCLKVLCSGGSHNLPHILNYLQEQNVSFGRVYSELPTLNDVFLEITGKELRDMKRIVDKGLLLAGGLLMAGQSGRLAAPVIALLLAMTAAAYGSCVDNRRWHCVCLAGMFAVCFILPELCFFVPVLLYDCAEKKEMRLWFLSVPGLAFFYREQMIRQPLLWAADGMLIVAAILLAYRTGRILYLEQEMIRLRDTSTELNLVLQEKNKNLMEKQDYEIYLATLRERNRIAREIHDNVGHMLSRSILQMGALITIHKEEPLHGQLAGVGETLNQAMNSIRESVHDLHDESIDLRQSIAEATREMKEHYQLTVDYDMSPEIPRNVKYCFITAVKEAMSNIAKHSDADKISVILREHPAFYQLTVEDNGTVGRKGQSGLLWEEEVVRMDGKEGIGLSNMKERVQALGGTFRIHTENGFVIFISIPKRDKMMRVLVVDDDKLVAVSLKTILEADGEITVVGLGEAGDDAIRLYREQHPDILLMDIRMQGMSGLDAAECILKEDQAAKILFLTTFSDDEYIVKALNMGAKGYLLKQDFESIVPALKAVYGGQSVFGGQIMGKIPVLLAGKGSFSYHDYDISEKEQGIIELVAEGLSNREIAEKLYLSEGTVRNYISTILDKLKLRDRTQLAVFYYKNCGMIFETHAHYDDEVFNEDREQLLAGLPEKGIGRVINVGASIETTRTTLALAEAYDYIYAAVGVHPSDIDGLNEETYSWLKAQTAHPKTVAVGEIGLDYYWDKEPEVQAAQREWFVRQLTLAGETDLPVIIHSRDAAEDTMRILKETGRFREHPGVIHCYSYSPEQAKEYVKMGYCIGVGGVVTFKNAKKLKQTVEQISLEHILLETDCPYMAPEPHRGTRNDSSNLSYVAARIAEIKGVSVQEVEQTTWENACRVFGVRMYVFICEDSLEGIFTGVYDACASRLGHRNIRLATGEPENYELFSEYIHVAPSADKTGKVIRTITSRFGMQFYESIYQAAMSGEPSSGRKMDKADAIYETILLALASGDGQKVLLSLGEPCVYRIFELCRATNREAYHHLEFLRFSELENGVLFATIHPKDNVLPYLAEHFTDRLPSENFMIYDATHQSVAVHKVLSSYILTDAADLDLEKVSRYSSDEEAFRQLWLTFFDHIAIESRKNPGLQMQLIPKRYWTDTPEYSRFCMNIQQNLSLMEKLAILTDAAKYDVACTSSGADRRGDGRHMGNCLAPGVCHAFAADGRCISLLKILFTNECIFNCAYCQNNCNSDVPRASFTPDEICTLTMEFYRRNYIEGLFLSSGILISPNYTMDLIYQTLYQLRTVHHFNGYIHVKAIPGADPALIEKAGFLADRMSINLELPTANGLKQLAPCKSRHTILSPMRQIQNGITENQNELMVYRKAPKFVPAGQSTQMIIGATPENDYQIMRVSEALYEKFHLKRVFYSAFINVNGDSSLPVLPGGPPLLREHRLYQADWLLRYYRFHVDELLSEDRPNFNIYLDPKCDWALRHLDTFPVEINRASYQTLLRVPGIGYKSAQRIVAARRDTALTYDDLKKIGVVLKRALYFITCSGRMMYRTKLDEDYICSHLMADHTQVPTELRNTGYQQLSLFDTGLALMDTDIFEQFPDRETFDKYWNENYQPVTYEDVREAFTDFVKSADGHIYLSDYEEKGLISREDFKENLSQEAQFTFEDGLTEVFYDKNPELYETAFALYEESKLTGKGDASVAQTFHETFRALYAEFLDRLYDEVLAAWQHMATLGIPQNTITVLQKYHFNFQKKFGQNFLIDTHVLERIIEAAGITKDDFVLEIGPGIGTMTQYLCENAREVTAVEIDQNLIPILADTLSAYDNVTVINEDILKLDIVKLAEEKNAGKPIKVVANLPYYITTPIIMGLFESHVPIDSITIMVQKEVADRMQVGPGTKDYGALSLAVQYYAKPEIIANVPPNCFMPRPNVGSAVIRLTRHETVPVQVEDEKLMFRLIRASFNQRRKTLANGLNNSPEIHLSKEVIQESIEELGVPVTIRGEALTLEQFAALSNIIGRRMKQQAMDGQQNNQSGWNRNETPRTYGEDTKMYQNRQNASQQPNYGNVQDMSQQPNYGNGQNAYQQPNYGNGQNAYQQPNYGNGQNPYQQPNYGNGQNPYQQPNYGKWQGNPYPQEQHGPVSDVLCNILLLIFMAQIIINFVVFGATWNAMAGEGIDAYLDGSVSLGSPVQMLSMFSNLLFVAMLVLLILDIVKISNQKYKITGLVLFAIFLRPGYYVWRAHVLKRKMTFPIIYTIVYSGVTVAYFFYSFYKVFSLTFGIMQSLNMRKKWKHYIDRMLTFALIGILLPLFITIICQRMRLEEVIYGTYDAITEAAEREGGEELEEQLPFILAKEIRADAEDAALMAQCVIARTTLYDAAARGEEQPAAFSEEELRQALGETYEKAMERLETCVEETSGQVLSWNGGYAYAAYHAISAGSTRDMSRSAEAAVPYLPAVECPADLTAEGTLSIIYCEETDILKRCGEHFAEADVSAVSEIQVTERDAAGYVQQVMLGEYVCTGEAFREAMGWNSACFTITQMGENVRIVTRGLGHGYGLSQNEARAMAQEGTSYEEILQYFFPGTTLVTADQIKMRKSRFWAFLGRKQYVIAGAIVIAAAVATTVIYSDHEQQQREQLEEELAQENTPEEAGLVAATESTEQTAQASAVIPPEQTAETEKLEQKAAETTESTEVAQVEKEAENETAETGAGVNALHFDPEDGMLWPMEGNVILNYSMDSTIYFATLDQYKYNPAVIIAGEVNNKVYSVAKGKVIGLSNNEETGCTMTVDLGDGYRAVYGQLKEPNFAVGDYVESGHVLGYVAEPTKYYSVEGSNLYFALQKDGQPVDPVAFFQSMEFKEYSKAVMAWVDGVMQNRGADAEKTLKYCADIEQYAKQTGDPKLLGFAYYYAGETYYVLNEGEQLLKTITRAITYLDQAEQWDMVARAYNILAIAFLNRGNTPIALDYYLTGLGYCKKYKLANEENVINLNLGTLYLGNEQWNEAQRYFEKVSSDIKAYPKTPNYYGLMSCVAVCLGRCFMQREQNERVQAQLDYLDQVCWEHMQKIERLSALIFKAEYYHRVGRITLREECIEQIRGLVDMDMAVMDIFDDVYGLCRLLLEIDKEDVFWDIVAVLEKLTKNANIANLQRKIVSLKILCYRRKQDEAAYLEEAGRFYELTEALDRENHYMIANMLSVRRSLEHANEKRREMEKANERLLEKSETDPLTRLANRFRLNDYLERAFERTRDDHRAFAVEILDIDYFKEYNDNYGHQAGDACIVAIADELRKMQSHDTFCARYGGDEFIIIYEYKTEDEVFSMADSLRERILDRRIEHVCSKALPVVTISQGICFDVAPEGSRSWDFLHAADMMLYEVKKRSRNNISLGHLDAKEARYGEERKFLMGYIDRSSEICAFLDKREMPCYDSKYCAVGRGGHFLPVLGMRQRIGSGVTERKKMETVRFDELDLYPQVLRAIADMGFEEATPIQSQAIPVVMSGVDVIGQAQTGTGKTASFGIPVLHKVEPNSRKTQVIILSPTRELAIQVADEIRKLAKYMHGVKVLPVYGGQEIGRQIKALKGGAQIIVGTPGRVMDHLRRKTIRCDAIHTVVLDEADEMLNMGFRDDIETILEYIPAEGRQTILFSATMPKPILDITRKYQHDAVNIKVVKKELTVPSIEQYYYDVKRSDKVEVLTRLLDYYNPKLSLVFCNTKRMVDELAEELKGRGYFAEGLHGDMKQSQRDRVMKGFRSGKTEILIATDVAARGIDVDDVEAVFNYDIPQDDEYYVHRIGRTGRAGRTGRAFTFVKGKEVYKLKDIMRYCKTKIVAMPIPSTDDVAQIKAEKVMEEIGRIIDEENLSDMIDMIERQVNASDYTAMDIAAAFLKQALGQVNLDNGSDADYDFDNTGAEEGMVRLFINIGKKDRVKPGDILGAIAGESGMPGKLVGAIDMYDKYTFVEVPREYGREVLEGMKNTKIKGRSVNMEPANQRQNVTQDVLSGAIRLESDGDSEAADPETPEDEADAGMNEEATDTEAENEADEAVEADPEPEVADNETDPEADQRAYASVNTGWVTEEEKENFNPVYLAGDQLTVAELVDRLGITDQNGANITLYASWDDCPWIVAVNLYYTLSQAQQGFITDSEILSHATASDREDGSPIEPGFHENGTSFSIPDYQAADFTQFRHEGSCTENLTVVDSAGSMYYKQITVYVVDTAAVDVKPDGTTRMATFKHISSKNADYGAAEAYLTFEHDEFTMKPTLDENGRLIPREDYRISSLNCGGEDFAVACMRANLRHEKNQKREDVKSHHYIISFDPRDGTDNGLTVDRAQELGEKFCKEHFPGHQALVCTHPDGHNHSGNIHVHIVINSLRIYEVPLLPYMDRPADTREGCKHRCTNAAMEYFKSEVMEMCHREGLYQIDLLNGSKERITEREYWAAKKGQLALDKENAAREAAGQTTKPTKFETDKAKLRRTIRQALSQATSFDEFSSLLLREGVTVKESRGRLSYLTPDRTKPITARKLGDDFDKAAVLALLTQNARRAAEQTTAIPEYPHTQKERLREEKAAKTTPADNTLQRMVDREAKRAEGKGVGYDRWAAKHNLKQMAATVTAYQQYGFSSPEELDEACSASYTAMQESLAELKQVEKTLNGKKELQRQVLAYSKTRPVRDGLKQQKNAKAKAAYRQKHESDFIIADAAARYFKENGISKLPGYKALQAEIESLIKEKNSGYNDYRAKREEYRRLQTVKGNIDQILHRERKPVKRQEQERMRKRYNTPHRSRVVKTRMTEEEYAEFAERLSACNMSQAEFIRQAITGAAIRPIITVSPVNDELLAAVGKLTAEYGRISGNLNQIARTLNEWHSPYPQLAGEVRAAVSDLAALKFEVLQKVGDAVGNIQTYQLMEQIINYRDIPTDKRIDILNALERIGFFPAYGGVRTMQQIMEKSVPGSGPQFYFVFRENELIGYNFLIGDTKKYKAFPWLAISNMDEQKLTVCEELMKIQIAFFEELGMQKIADHCVRIMEDYRKGIGKRKESDCRMSQLLPYETIVKASEGDPEAVAAVLSHYAGYVRSCAKMDGQINTDMQEHIVRQLIESLLKFRFDRMLRKVFICGTEWIVFFFYQIFKRDFPLAAAPYAPGCVYGSVANNSLAKGIVCMPDMFLILFVFGHGKSPFLNNGRGRQHLVLSPSMSKQCDIVRDILPLYVDGACSEASAEMVKEHLNACADCNAIYQKLLSHTSEDVLHEESESVIMRHEAKEKQRGRKKITIAVLVSIALCIIAIFTALFLLPINIAYEPVKIDFPFEVEDVENVEMYHYDGVPASAEKKVVVAENDIKTLYDKFKGLSLKDKTTEETAGADVTSFRFNLSDGTSYDLIYACYGVKNGELKSAAGGFKYFTSADIGSYWNNLNTELEAIPINESELPMDYEKLYKAYYLQVYSYTISLAKNREIAEEITQNTFYKAVSTTSQFKGKSDELTWLCSIAKNLYHDEMRSRQRVADVSKINDLPSNENVENSVADSDMAFRIHLVLHRLEEPYKEVFQLRVFGELSFSQIAAIFGKTESWARVTYHRAKLKIQERMDEKHEMEFFASAVDTLKVLVMAIGCGLGAWGIVNLLEGYGADNPASNAHVRMSYDELELDKLGDKKTALFFLISDTDSTYNFIVALAFSQMFNLLCERADNKYGGRLPHHVRVLWDEAANTGQVPGLEKIVAVIRSREISLTLFYQAMSQCKALYKDHAETIMGNMDSIVFLGGREASTLKDISENWLGKATISMQTDSRTRGQSESYGLNTQRLGRELLTTSEITTMPGNKCLLQLRGLPPFFSPKYDLKQHPNYRYTAEHDSKRNAFHLERLTSRRLRLKPEEEYTVYEVDTSDEDADILNYDDLDSADDFVMNNTATNTATCPTVRKQIGKTTYIVRVHFSQTAKETMEDKIKRLLREEVRKMMQYTQAQIDRANAVSLEDFLRTQGETLIKSGREYRWKEHDSLTVRGNKWFRHSQSKGGYPIDFVMEFYGKSFPEAVQLLTGESAEGQTEATTAPPTAFHLPLHNRTADRAIQYLCESRGLNKTLVEAFLLSGDIYEDAKRHNVVFVGRDRSGTPRYAHVRGTADPFRQDITGSDKSYPFRYEGNGNQLFVFEAPIDLLSFICLYPQDWQTRNYLALGGVSGKALDRFLSERKDTRKVFLCLDSDTAGGEACFRLAQDIPSEIAVIRLVPARKDWNDVLRQQGDIPSRKFIAETITLRELPTAQPVPMLRMADVELTSVDWLWFPYIPFGKLTIIQGNPGEGKTYFAMRLAAACTNRKPLPGMETLEPFNIIYQTAEDGLGDTVKPRLMEADADLERVLVIDDRDTPLTLADERIARAIRENNARLVIIDPVQAFLGADVDMNRANEVRPIFRSLGDIAQATGCAIVLIGHLNKAAGTQSTYRGLGSIDITAAVRSLLFIGKLKDSPTTRVLIHEKSSLAPPGQSLAFSLGDEKGFEWIGAYDITADELLAGTDTAKTESKTAQAQMLILELLADGKRMPSAELEKAVNERGISSRTMRTAKSRIGDRLVTEKDGTAWVCYLRDMNYHDWKSEKNPVRRMAKRLLSGDPLTDGRPLSDLIELDERTRKELAFEATLTDQQIEMLQELGYLPSPNDNEMALFHLSVTQTKRSAGQSAIASAAYRAGERLYSEYYGEYSDYTRKGGVICSDILLPSHAPPEYADRQTLWNAVEKAERGKNAQLAYSFDIALQNEFSLEENIALARQFLLENFVSRGMVVDFAVHQPDREDGGIPNPHFHVLCPIRPIKQDGKWGLKQRRVYELDEDGNRIRDQNGEFIFNAVPTTDWGSPETLEYWRQTWAELCNAKFAEKGLDVRIDHRSYERQGVELLPTVHEGATVRAMEKKGIRTEKGEFNRWIRATNAVIRDIKKKIALLFDWIAEAKAELAKPQAPDLVSLLNAYYTKRRAGAYSQKGKVSNLKEMNETFNYLRANGIYTLEDLESRVSEHSAATESLKKTLDEQTARMKAIKQLYDSSAAFQSLKPVYDGLQKIKFEKPRAKYKAEHEAELKQFYAARRKLTGEFPDGKVDVKKLSAEYDELEQAHDTTYGEFKTVRDDLHRLWKVRSCVDTAARFNERTEEQKLQNRPQTRHKKEDISLMTKPKTLEQLRAEKERAETQLAQEKHKLNRLENRKKYLEKGERQKRTHRLCNLGGTIESLAPEVKDLTRTEMTELMEHIFSLSEVQRAVRHMAITHISQANREKELKADGTISSERHADMIIIRGLNKAFGEKIIFSNFNLEIPDGSFVVISGDSGSGKSTLLNMIGGIEKPDSGSIIIEGLNITRLKNKNSFFADTVGFLFQNFALLENKTVKENLSLIKKSSRTKVSLKEALNRVGLSKEVNKKVYQLSGGEQQRVALARLMMKKCSVVLADEPTGSLDKKNRDIVMRLLHELNEEGKTVIIVTHDQGIIEDEPYVVKIMKHIRNILLLITIIFAFVMQAEVYQNMLWNFNGAYYLSSRYTTTNDDMDSFLANAEDTAEKHGVHIFSTFNQRVSNYQTRLYIYGDDTVVRDSLKSTMDIEEKTYTALIGGITVIEFEDFREAKNTGNGQEIMVSYIGDDDDIIATYQDLAKEYSISQPEFWQSTETDMMFIVWGLVAILMIVLNMIEVIRRQKEVVVRASLGENAAVIALKAVVADMISYAALFVLAKLLVSQFISGAYEDHLILAVYCAGAVLSVIPYAAFVRFDVKKAFANASDKKGMFYLLNGLKVFATAMTIFTITTNLSSIQGNLLTNTTLLENHYNDYYFGVMQIEPPFEENEEESKESKFWNDLYENEYNTINPVVCIGSRISDTDNYIFVNHNARDMLQGFSDMLTEDDEKEDIVVFVPKGRNAESYKDIAKEEIGSLTQNAEELRVVYKEYSGREQFYYLNSNREEAIDGLSRVTNPIVIYQANEAVALNGSYIETGTYNGEVIYGCDESTIRSVAKKYSEQLGSHYFMLTNVGEDYIYSHSFLVKLIGFISSLCVLVLLLDIAIIISEVKMEFRLNAMEISLKKVLGYRFYERHKRFISVNLLENIAVVILICIVSIFISNASVGIALLIGALLTIIEMAIIFTNIMWVEKTNISKSLKGGCLMSEEVRAENCSDFSHVVQSCGRIVHEFYGTIYANKENGKLESNKRMWLYEKIHISILGNRVSVTYSKEVMNITYTQNGDYLIPNIVIRKTKPLGHYGRLRKAYLEMHRPILFNELVLSDKLFEHCAEIDEAARNRMELIVRSLAEQNGVTEQLKAKNQMEWVRQMNACKAQAEEIVKAELIYDMAAGANLGEKLFGMVKTIGPVFQSYAPGLGLLDLAVGVAGAVILYFVLQSKIKKARKFRRDMEYGSARWGTEADIKPFVDPKFENNVILTGTEFLTMNTRPKIPANARNLNACVIGSSGSGKTRFWLTPQLLQAHSSYVVVDPKGGTLSQCGYFLQKKKGYKVKVFNSIDFSKSMHYNPMAYIKTESDVLKFVNALIANTKGDGKEGDEFWTKAETLLYCALVSYIVFEGPEEERSLNTLVEMINSMEVREDDETFKNAVDYMFDGLEKRNPQHFAVRQYKKYKLASGVVCSKRLLNQAVGKSLRTHNLKPKKGAQVMRKNEKITALYERLSRDDFGKDDDQQRESNSISNQKAMLEEFAARQGFTNIVHFTDDGISGTCFDRPGFLAMMKEVEAGNVEYLCIKDMSRMGRDYLKVGQIMEILRQRGVRLIAINDGVDSAKGDDDFTPFRNIMNEYYARDTSRKIRSTFQSKGKSGKHLTGTVIYGYLWNEARDQWLVAPEAADVVKRIFAMTIDGYGPYQIASKLKSEKVLIPSAYLAQHGEGVNKNKTFKDVYGWGSSTICNILEKREYLGHTINFKTRKHFKDKKSHYVPEDEWTIFENTHEPIIDQQTFDLVQKIRGNVRRYPDGWGEAAPLTGLLYCADCGGKMYVHRTNNGKRISQYTCSQYSKVPVGKLCKTQHRINEDVVLSLVSEMLKAIAEYAKHDRAEFVRVVQEAQSSQQTAEVKKQRIRLATAKQRVSELEVLLCKIYEDNILGKLSDSRYATLDAQYEKEQTELTAEISALEKAVKSYEKHEKDADRFIALIDKYENFDKLTIAMLNEFIEKILVHERDRKGSIQTTQEVEIYFNFVGRFVPPAFGEVELTPEELEEIRKREERKDRLHQNYLKRKASGAQKRYEDKIKGRKKAEIEAKKAAIRAEDIAKGVFVPVSSLPQREPMKGVQTAMQEYVEERTIAISVKAAKLSGKVLAAACKKVFSEIAKQQEAAKRPKGRQSVRKLMNHHGGKNAMKYVGAPKDFDRIVKEFHVDYAFHKTGPGHYLLFFKADQADAIQAAFGKYTEKVMGRSQDRPSILGQLRQFVEQIAARPKQKEQVREAVKEERMFEAYVTNLGLYPERGAGAGEYLKFPTTVEEVQALFSRIGIDGKQYEEYFITDYDSDILELTDHLGEYESLDELNYLAHLLEEMTPAELEKLEAVMDAGEYTSSVKDLINLTQNLDCFDFYSDVNSEEELGRMYIQDFEAMQVPEHLIDYIDYEAYGRDIRINDGGHFAPGGYVADNRSNFVEHYTGLDDIPDEYRISKVHARDEKEETHSILAAIKQFKEAPPTPHKEKAGPSHEERMKRPLAYITAAWCGDPDTDMELAARYCRMAYEAGFSPICPILYLPLFINDAIPEEHKNGIDMRRDMLRRSHVLVVCGDEVDEDVKNDIAVAKRLNITATTLDGILTVNQQGRHDVMADEKAKIVTDATGPSSGPAPAQPEVDAQVSKQEQSAPEAPTPDKAEAPAQEAPAQDKAADAPKEQKAASVSVFNFSEIMAEKKATERAAAQQEAKAPDKRTSPTPTKEDGPKQEKSKEQEQAPKRRGRPPKADKYKAAAPAQKEAPSKKDKAVQKSAQPGKTEKAAPSEKTEKAPKAPSPAKGAPEVKAPVQAETPAAPAEAPRPGKEEQIVYIKLSELHAFKNHPFQVRNDEEMKAMVSSVRDKGVTQPAIVRPREDGGYEIVSGHRRQKASELAGFVDMPCIVRDLTDEQAITQMVEDNTNQRENILPSERAKALKMQLEAIKHQGAKEATSGQLDPKDAGRRSNEIVAERNKMTVKQVQRYIKLNDLVPDLQKMMDAGQIKFTPAVELAYIKPKNQRYIAVAIEGQQSAPSLSQAQRMRELDQKGVLNGDVIDGIMMEDKKEVDKVILTGAELGKYFGKETTPREMKDQIIKLLDDWKGQQKEVAKPEKKAAQQEKMIFMTYHSSLMSPLTYLRLFTHVFGHDGWQHFIGNMAYILLLGPMLEEKHGPMKIIEVIAVTALVTGVINYVFFWNTALCGASGVVFAFILMVSFTSFREGEIPITFILVAVIYLGQQIYDGVVLDDNISNMAHVVGGIVGGILGFSLNKRSKYGIMRIVNNYEYNSIELYFDGEPDEMTRETLKMFKWRWNPKKFCWYNKNTAENKALAESLNKSTDEMKDKKIPESYSEKYEKKETESSMDIKSFVDSLFKASDEEEKMTLKVTTQADKKVKKVSKKVIDIDDDNFELDLMKKKILIIASLCMIALGAMIISDKIYKSTDMTGNVLEDALIPEYSGKETVPINGNKPFWSAEEYTTKSFEVYSKLDELGRCGVAYANISIETMPTEERGEIGMIKPTGWHTVKYPEVIEDRYLYNRCHLIGYQLAGENANEKNLITGTRYLNVEGMLPYENEVASYVKKTGNHVMYRVTPYFKGNNLMADGVLMEAYSVEDSGAGVCFCIYAYNVQPGIDIDYSTGDSKKVKMDNKSISHTRWKCQYHIVFIPKYRKKVLYGKVREDVREILNTLCKYKNVEIIAGAVCVDHVHLSVAIPPKLSVSDFMGYLKGKSTLMLYDRHPELQSKWDKAFWARGYYVETIGNITDEAVQKYIKEQAEESRKRLTRWKAIAKSSRRILSMTAFFWLIHMTRRWWREFLTMEGIFDLILETVLSKNGEITIAGDVYAKNLVKSKFLKLNYSHVEYAINCLGKNTTKVRNIKSYLLASLFNAGSTISSYYRAEVNHDMPQYAGMNLYFELLKTPVFTVEDVNKYYDNMDSARSAIKRLMKEGMVAKIRNNMYTCISGETGAPVANRFQIASKITPTSYVSHHTAMEYYGITDQVYYDVYVASETSFREFEFDGYTYRYVASKDMEGVETPALSSGIRITNRERTLVDCVKDMDKIAGIEEVIQDIGSMKRMQEKRVLKYLDLLSNQFLYQKMGFLLSEYKEKMGLSDEFFDTCKSQIGKSKRYLTKDMSSGRYVDEWKLVIPENIYNMKNGVIEDATIMATESGFVRDTFEKVLRLKEILKFLNEDKSLREHLLLKGGTAINLTVFNLPRLSVDIDMDYTPNDTREGMLECRAKITDIIKEYMESEGYQLSEASRFSHSLDAFHYNYQNAGGNRDMIKIELNYSLRAHIFEPVYRSILPSAFDDGLKIRMVNPLEIFAAKGNALITRAAARDLYDWCNMLSEGLFEEQRDLFRKCFLFYMTISADTLNKSFDTSAIDTLDFNKIRRDLFPVLNKKDNFQLDERKKIAKNYISDLMVLTTKEKEYIDRFEEKKYMPELLFEDAEIVERVKNHPMALWKCKEMAAVEQKLSVYFSKEKFNQEKMKQLIQGSVKTLEEKQFGYDIIMHSNYCLLMAEILRVWKQEGFQIKKRKKETVLSEKFTEVSEYISQHYQEDLSVAELAEKFHMSYSYFAAIFKEYYGQTCKEMILTVRLQKAEDLLQFTDFDLTYISQETGFCDCSHFIKAFKQKYGVTPRKYRMKEKSFDFVSRKMYYYSTVNNIVTTHSALLEKDGFDIVKVHFEMNQELMTLDFWQDTVIYESKTFPVGTLACDALNVPVNTIAKINEQCEKINLLLGILNAGQDASALCPIAKEAALTMLDILSQTPPFSYMNISKHRERIEKVFTVDNALKYVEFAIKAATNSLQFEEIQNFTDAMMLQRYTAVFGHLAYSLGAYQTAMLDFAEKTDGNEADRTAEGFAKMFGSHFPPEFSITEGNAWMSTLNNSVQYVSVIRPGEKVAKLVKRMHYVSFMKKLFNILKEKLAPLSSKLQSLKSILPQKKPHSEKYYKRIAFLNKYSLIFHFLLACLLILAVETISRRDFVSAITFISNHTLAFLYNALIIFASLSLVYLTKYRTQMRILISGLWIFLGTVNGLILSNRVTPFSYTDLKCLPDLFAMQNTNYFTAEEATMVVSVVVAFFVILGLLFAKGPRYQGKRHTVLGPVSIAALILIGLPITTQAAQSSNILASYFANIAQGYSDYGFVYGFSTSVVGRGMDKPEDYSEETVDAINTLVDSASSPTTVSTGSEPNIICVLLESFCDPYEVNFLNMSEDPIPNFHNLEANYSTGYLTVPVVGAGTANTEFEVLTGMSMQYFGTGEYPYKTILKQTDCESIADDLSQIGYGTHVVHNNTATFYSRNNAFSMMGFDTFTSKECMNISQYTPNGNWPTDDVLVQETVKAMTATENQSDFVYTITVEGHGDYPTEKVLENPDILVSGAADEASNNQWEYYVNMIHEVDDFIGDLITAVDRRGEDTIIVFFGDHLPTMGLTDADMKSGDIFKTKYITWNNMGLAKKDADLTAYQLLAHITDQAGIHEGTMFRYHQTQTASETYLSGLEDLQYDLLYGKRYTYGGEDRYPASDLVMDVEDVTVSSVRKNTSNNTLTVYGANFTKNTKIFVNGNKVPTTFLTSNLITTSLDNVQNGDTITVNILGSKSLLLRAGTGEVVYEDPDIVPETEDPTEIPDTTATEMKNTETESSETKNSETESSEMKNTETESSETGSSETTSKTDSSAVTSEAASDSNNMKTQKTSTANTHIHADGITHTHVDGITHAHADGSTHMHADDTVHTHASGSVHTHAHGSTHTHPHHHENTKAVLNRMNRAIGHMEAVRTMIEDDRDCSEVLVQIAAVRSAINNIGKIILEDHISHCLVDAVETGDEQVIRDLNDAIDKFVKMVGPSSSHTAGAVKIGRVSRKLLAEEVADAKIYFHGSFLATGKGHGTDKAILAGLLGMQVDDPRIPESFTMAKESGMSFTLEGIDLGDVHPNSVKMNLTGKSGRTLEVIAASVGGGQIRICELDGLTANFSGDYPTLIVHNIDQPGHVAEVTSMLAHKSVNIATMQLYRESRGTRAVMVIECDREVPGEAIEWLEHLEGILKVTYLSMLEAMYRSLEELCRMERETGKPFWKIVQEDDCVEQGISAEESFAQMRGMYQAMQYADAHYDETLKSASGLVGTEGTRMKRAREAGTLLCGDFIGKVMEKALKTSESNACMKRIVAAPTAGSCGVVPAVFLSVQEERGFSEECMVEALYVAAGIGGVIANRAFLAGAAGGCQAEIGSASAMAAGGVTYLLGGGADEIANAAALALKNLLGLACDPVAGLVEVPCVKRNVMGAVNAMTSADMTMAGIFSKIPPDEVIDAMRSIGRSMNEDIRETGKGGLAGTPTGVEIRDRMAGTLMGSGMVTGLTGSEGEESSCSRMEAGVENRWSKIREFLACRFMDFREEYKQKLVSADEAVKLIKSGDWVDYGWCTNTVDALDQALAKRTDELTDVKLRGGILMKPLAVFAREDAGEHFCWNSWHMSGIERKMINRGVAYYCPIRYSELPRYYRELDCPDDVAMFQVAPMDAHGYFNFGPSASHLGAMCERAKHIIVEVNENMPRCLGGTECGIHISDVTYIVEGSNPPIGELGAGGPATDVDKAVAKLIVDEIPNGACLQLGIGGMPNAVGSLIAESDLKDLGVHTEMYVDAFVDIAKAGKINGSKKNIDRYRQTYAFGAGTKKMYDYLDDNPELMSAPVDYTNDIRSISALDNFISINNAVDIDLYGQVNAESAGIKQISGAGGQLDFVLGAYLSKGGKSFICLSSTFKTKDGQVQSRIRPTLANGSIVTDARPNTHYVVTEYGKVNLKGLSTWQRAEALISIAHPDFRDDLIKEAEQMHIWRRSNRMATISLCMIVKNESAVLARCLDSIADLMDEIIIVDTGSTDNTKEIAAQYTSRIYDFKWTSDFSAARNFSFSKATMEYIYTADADEILDDANRERFLRLKGALLPEIEIVQMKYVTQGTFDTVLNAKKEYRPKLFRRLRTFTWIDPIHETVRLTPVTFDSDVEILHCPQSLHSKRDFSIFIKAFEHDGQFSPKIRTMYAKELLKTGDKKDFTDAKPIFQLIFDNDPADDARKEAACVLARIYRMEDNKNEFFKLTMKDMLTTPCAEICYELGTYFVGQRDYAEAVLWFYNAAYETESILDVHTSGDLPLLGLVECYETLLAGEEAKIPSDTALTIQYEMMLDKYREASRDWRMPEETMAGKQENKLSWQDGRFCAKMSGGYVCRADGRQMETEYTDKMNPVCGVILSAVLLGETDSLSVMPVAALVLVCMGIYIVNRPEKTEMSAIVTLKKGEGRTIKAGGMWVFDNEIDTVTGTFENGEVVLVHDFDGYPMGRGFINVNSKIRVRMLTRKIDQEIDRAFLRMRVQNAWDYRKTTVDTSSCRVIFGEADFLPGLVVDKYEDVLVVECLALGMEQFKETIVELLKETLVKDGICIRGVYERSDANERTKEGLPKVKGFIGGEFDTNVEIVENGVHYMVDVVNGQKTGFFLDQKYNRLAMQRICKGKKVLDCFTHMGTFALNAGIAGAAEVTGLDISGYAVEQARENARRNGLEDTVQFRCANVLDELPKLAQSGEQYDVVILDPPAFTKSRQATKNAIKGYREINMKGLKLVKDGGYLATCSCSHFMTQELLAKTIREAARSAHKRLRQVEFRTQAPDHPILWAADESYYLKFYIFQVVDEKMTVDRRVSSIESSFKMEGMPFDAECRQRVRNVLVKKVSAADAISELNKKYRVSKKQVEGSRVMKDQEYDYFYDDEQDAKYCYPGTNVLKNKLDIKDLDTLHEAERDYSAVRQAELVGQGVTGDFSFKHLCSIHKHLFSDVYSWAGKTRTVDISKGTVFCLVQFIESQFDDLYRKLKKENFLADITDKEEMSGRLAYYLGEINMIHPFREGNGRTQRIYIEQLCLNNGRFEIDFTDVSKEEMIAASVRSANASNDMLEKLIKSCLVEKMAIETEMFRLLFLCHERVNLMELYTREKELLIMFGSERRLEFSVMEIKRDAYLQQLIKRKDNGMIKVITGIRRCGKSFLLFTIFKRYLLENGVDVDHIIEIALDGIENEELRDPKVCFKYIKDAMKDDGKYYLLLDEVQFMSQFEEVLNSLLRMSNIDVYVIGSNSKFLSSDIVTEFRGRGDEIRIYPLSFAEFYSVHDGDYDDAWDDYMIYGGLPQIVSFQSERQKADYLKNIFANVYLKDVIERNKIQNVDEIGILVDVLASAIGAPINPSKIANTFASERQMTYANKTISKHIDYLTDAFLISKASRYDIKGRKYIGANLKYYFTDLGLRNARLNFRQQEPTHIMENIVYNELLIRGYNVDVGVVDIFDKDKEGKRVRKQLEVDFVVNQGNQRYYIQVAYDMTSEEKQTQEFNSLRNIPDSFKKIVIVNGSKKPWRNDEGFVIMGMKYFLLNANSLEFMVAFIWEYMKVPEDSREKVKNLLKDANENGVKISHQAPTLYDVVPKEEIAEFEELMRKTIADIVSEASSVACWVYVQKYVKHKTLNEMLQELPDVSQFILAMDTWFEKLMVIEAIIEADNEMQRIKDKIGMLHEIMKQDTLEGKAKTKNGVKRLCFSIICILLEVIFIITIVTRLNEYAEIINLFTRILSGILVLGLYASNKTSSMKMPWVILILIFPIMGVGLYLLIGLNGGTHKMRERYAEIDSKLLPMLPDSQECLSRIKETIPKAGNIASYIQRNSQYPIYQNTDIVYFDEAVKGLEAQLKDLEKAQKFIFMEYHAIEDAEAWHKIQDVLEERVKAGVEVRVFYDDMGSIGFINTDFVKKMEAIGIHCRVFNPFMPGLNLFLNNRDHRKITVIDGKVGFTGGYNLANEYFNYTHPYGQWKDTGIRLEGDAVQSLTVTFLEMWNAVSDKDANDSDFSKYLFHYDYAAQQTGFVQPYADSPMDNEQVGEEVYISMINKAEKYCWFMTPYLIITDEMTHALCLAAKRGVDVRIITPGIPDKKFIYNITRSFYHGLVKHGVGVYEWTPGFCHAKMSVADDCMATCGTINLDYRSLYHHFENGCFMADCQAVVEIKNDLIRTMGECRDVTDQYQTGRSAYLRLGQLFMRLFAGLLMSNLENYMKQQAIFCEQNDSISKNLYSEYGVKRGLRDEKGQGVLTGLTNISDIKAFEYCDGVKSPCDGELSYRGYNIKDLVTGSKGKRFVFEEGAYLLLFGELPTDTQLMEFQGRLSDCMELPTNFTRDVIMKAPTSDIMGSMTRSILTLGSYDKEKESLEIPNVLRQSMQLIAVFPMLAVYAYHAYCHYEKNESMYIHRPEKDLSIAENFLRLLRPDTKFTELEARVLDIALLLHMEHGGGNNSTFTTRVVTSSGSDTYSVISAAMSSLKGKKHGGANLMVMNMMDDIKSHVKDYEDEEEIASYLSKILKKEAFDQKGLIYGMGHAVYSISDPRERVFKGFVEQLARDKGREKDMTLYNNIEKIAPKLIAKQRQIFKGVSPNIDFYSGFVYDMLNIPRELYTPLFAIARIAGWSAHRLEELITTDKIIRPAYKSLVSKKEYIEREERMGAGTSAEEFFLKSINVESIFEFVERTDYLFLYSIKECVEKSDCHEGVYLSEVAEYMKLSIPETSKMVKSLENKGYIIWKLDEKKERTYLVLTNKAIELSNCQKEKMIEAYEKIISNIQEDDLEVTRCTLRKIRQLMEEIKMKKYKICKILLVILAIFLCMAFYELLGICVAYKKQPEVSNTTKKETKNGSWNECSENTERAVIIEKNPEALLQRVRLIKNAKKEIILSTFAFQSDESGKLILGALHDAADRGVHIRLLVDGMESWIDMEGNPYFYGLSSHENVEIKLYNKANPLKPWKMMGRMHDKYLIADGKRYILGGRNTYNYFLGDFPGHKNYDRDVLVVCDEPEKENSVNQLLEYFETIWEQEDSGYFHDNKKLANRKSVKNAVLELQNGYQKYFEENKERICDTDYTDETFETEKIALVSNPIHTGSKEPVVWYQLGELMKNAKNRVKIHTPYIICNDMMYNTWEEIAENDSDFSIMTNSVANNGNPFGAADYAKNRNRILSTGINIWEYEGGYSYHGKSILIDDDLSVIGSFNMDMRSAYLDTELMLVIHSKDINKQLEEGMMEYERVSRQVLEDGTYRDPYHVEPIELTKKRQRKIFLVQHLLGWARYLFMFQILIVEDDKELSQLFQKVLEKNGYQVKSASDGAQALEVLDKEYIDLIISDIMMPVMDGYELVSELRSAGYQIPVLMITAKGSFDDMRQGFLSGSDDYMVKPVNVNEMVLRVGALLRRAQILNEHKIVIGSTEFDYDAMTVTTDKESLVLPKKEFLLLYKLAASPGRTFTKQQLMDEVWGYETEADPHTIEVHIGRIRERFKDNPDFEIVTMRGIGYKVVKKMEQKKEKGLRIRSCLTGAIWLALVFSTVISALLFAFLNHFFNLPGSIPVLGWLLIFNTLIAGLITSFINAKLLEPITRLSKAMKEVSQGDFEQHLETNSRIAEVGESYQSFNVMTKELRATEVLQMDFVSDVSHEFKTPINAIEGYTMLLQGEELSPDQEEYVEKILFNTQRLSGLVGNILLLSKLENQNIPMKKTEYRLDEQIRQAFLSLETKWTEKEIGFQVELEEVKYTGNEGLFMHIWINLLDNAIKFSPSKGTITMFLKQEQDSVKFILEDEGPGIEDDVKSRIFDKFYQVDGSHKAEGNGLGLALVKRIVDSAGGTIKAENREYGGCRFVVELPIQKDETIMTFYQELQLNQAGSKNLLKKSETLKEKLYHMWVYLVKIAATMAFCFFFVSIFSILFGNENSIVGVVVLLCLMVFRNADLGIHTGQSTMLLALFFVIMTVCPHLANQFSPVLGMLLNIAALAVLILFGCHNPFMFNQSTLVLGYLLLYGYDVTGKSYQMRLVGMALGAALTCFVFYRNHKNRTYKRNLKDLIQEFDITSSRTKWQICQILCVPIVLCIAELCNMPRAMWAGIAAMSTILPFMEDMHYRVRKRIVGNIAGVICFTVLYFLLPSSIYAYIGILGGIGVGFSAQYGWQAVFNTFGALAIATETYGLQGAVSLRVIQNVFGVVFALAFCVIFYWFMSKKNGSCGAMLDLSDLYQFVTYADCGTLSAAADKLHISQPTLTRTMHDVEDAFGVPLFHRGKNRIELTDTGEVAVEQARSLLSEAEKAVETVQTFERNQHTITIHSCAPVPLWSLLPELSRRFPDNIISSKLTNMDEILQNVSSGNADIGILPQSCSDKNLLCIPYLKEQLYVCIPKEHKLAEHSQLSLPQLNGFNCLLRDEIGFWTNLVKSKMPASRFLIQTDEFEFEELVRTSTLLCFSSSKTTDSDQTLKGRKQIPLTDPEVNVTYHLISSTKSTILQSVSPTFEFRPQKMDYVTLNNGVKMRPAKRGTFHYHKDLDQQCRIMKKLKTDYVDLLLIHQPFGDYYGTYRAMEEAYKAGKARAIGVSNFYPDRYIDIAHFAEVVPAVNQVETHVFQQQKVAREYLAKYHTQIMSWGPFAEGKNDFFNTPALKEIGAKYGKSVAQVALRFLLQNGVVVIPKSTHKERMQENFNVFDFVLTDEEMKQIETLDTGKSLFFSHYSPETVEWFMSIVMKEQNHPNVIKIRNAHVHNLKHIDVDIPLNKIVGIAGVSGSGKSSLALGVLYAEGSRRYLDALSTYTRRRMTQAPRAQVDEVLHIPAALALHQRPGVPGIRSTFGTGSELLNTLRLMFSRLANHCCPNGHYLEPTLDVAAGKELCCPVCGTHFLAPSAEELSFNSQGACQTCGGTGFVRKVDEASLVPDESLTIDEGAVLPWKTLMWSLMTDVCREMGVRTDVPFQELTKEEKEIVYHGPAEKKHIFYKAKNTNQSGELDFTYFNAVYTVENALSKVKDEKGMKRVERFLKEDVCPDCGGTRLSKRARLPKLCGITLADACKMSLSELVEWVNHVPDALPEEMRLMAENICESFQMVAKRLMDLGLGYLSLDRAASTLSTGERQRMQLARAVRNRTTGVLYVLDEPSIGLHPSNIVGLTDVMHDLIADGNSVILVDHDTQILSEADWLVEMGPKAGADGGRIIAQGTIPEIEANPDSQIGTFLKEMHPIYRKKASEQEMFSLGTIHLSTDAIHTVKPLEADIPKGRLTVVTGVSGSGKTTLILESLIPALESMINGTKLPSHVKNITAEDIEQVKLIDAAPIGINVRSTVATYANVHDELRKVYAKLPDAKEAGYKAGDFSYNTGKLRCPTCDGTGSISLDVQFLPDVEVPCPDCHGSRYNRDAGNIKRKTKSGELYSLPELMDMDVQQALRACEDMKKICSRLQIIKDLGLGYLTLGEATPNLSGGEAQRLKLASEMERKQDASVFVFDEPTIGLHPLDVQTLLKVFDRLVSKGATVIVIEHDLDVIRNADYIIDMGPGGGEAGGRIIAKGTPEEIASDRGSITGKYLRMRTIFAEYNPQCNSIDVYTSADYMLRIDCWEAEKNLKTTPGSDSNDLSYISLPHFLLMKKKLCILVILIAVLLVGTVGCYFMPKKFGKNVNPSEVDHINVFDGNTGTGFTITDSEDIEYIVANIQGISMKRDGISLGRTGYSFKISYINSNDKDVIPVFILNSDNTICKDPFFYRCDGGLCFDYLKECEEKYRTNVTESIEEKMMTVNEVSKLTGVSIRTLQYYDTIGLLKPIEYTESGYRLYDDTSLERLQQILLFKELEFPLKEIKKIIDAPNFDRNKALEQQIDLLTMKKEHLENLISFARGIKGIGVKYMDFKVFDTRKIDEYSKRAKEQWGQTSEFKEFEEKTKNWTKDDEATAANEFMQLFVEFGQMKETNPADEQVQLQVRKLQDYITNHFYTCSDKILCGLGRMYAGGGELTENIDNVGGTGTAEFASKAIDIFYMSKKMGKTVFMNALSVILKTRLQAAKNEYFFNFGIILFTLMKDMKKKIIMIVACVMCCAGLFGGCGQSGMKQDNTAISNSEEGKQEGTTEEKEVTGTIDEIKDFMFVVTDENDTPYSFTFEEKPEGLENVSNGDTVTVRYTGTISEVDPFEGEVISVEKAQMKRHNKARKATELLAVIILASAILGACAENVQKQKIPAATYMGGKASITEICKELDAAGASHVDLFQEWVTDFADSAGKNARLEDAWSDPMKMKADIVKCMDGWEQNHDDSDADCRMTAFLLLDGMLCSESTEGNYAGTYLMFDTEAIDNVDRYEIIKKNRDMFTTLYGEKSVTDGSSPEIVFSDSWKYHGFQINSDRISLLSIVIYDPYSEVVFVGHTGILIKYSDYYLFVEKLAFEQPYQATKVHTVDELLNIMSLRAEYFGEEGEAGPFVYNNGEYIGTLKKNIDMTEKTPCNRSKMYFWDKHKTITGYYELLSAEVCNRYGLTQMEYDILMFLHNNPQHNTAAEIVKVRKSTKSHVSTSLKNLENEGLIERIQSEDNKKHIEIVLLDKAELIAGIVWMIAGVNVARLGVISYLNAESDLGRLAYSRRYLMTRMAAAIIISFGCYLPVTLFSKTKPKVGLLMIPKTCAYMWIIVMGLQILSEYMYTALTIAGSDSSGGAGIQADIKTMTANCVYAMSAVTALTAQNTTGVTDIMEVTPKFLAEQLDSIFTDIYPDAVKTGMVSSSELIETIAEKLTEYHAKNIVVDPVMVATSGARLISEDAIGTLKSKLLPLATVITPNIPEAEVLSGMEIKTEADMEKAAEIICNTLGCAVLLKGGHQLNDANDLLFQKEKEPVWFHGKRIDNPNTHGTGCTLSSAIASNLAKGRDLETSVRYAKNYISGALAAMLDLGKGSGPMNHAFAVEGEYKGMNKKRTSVFSNGLIWFGAGVSLAEILTGTYFAPLGIGKAMAAILLGHLIGGLMMFAAGMIGAKERKSAMETVKMSFGEKGSLLFAVLNVLQLVGWTAIMIYDGALAADGVLHIGNWVWALVIGILIIVWIFIGLTNLGRLNTVAMAALFILSLVLFKVIFFNSDFVMLITASDDTMTFGAAVELAVAMPLSWLPLISDYTREAEKPFAATLVSVLVYSLVSIFMYMIGMGAAIFTGEYDIAQIMLKTGFGVVGLLIIVFSTVTTTFLDAYSAGVSSVSISSKIQEKWAAIVVTVIGTAAAIVYPMDNITNFLYLIGSVFAPMIAVQIADYFILKKADAEKSAFQWRNLVVWLAGFIIYRILMQVDTPVGNTLPDMVITVILCLIVEKAAGASHNRKRGMKKLNLKKLTVTAILAAVAVVGSLFSFPVFGSKCAPVQHLVNVLCAVTVGPWWALAQAFIASLIRNLLGLGSPLAFPGSMCGALLGGLLYKYGKKLPFAYLGEVAGTGIIGGMLSYPVAYLVMGNKAAALFTFVVPFLISTCGGTLIAIIITLPLKKSGLLGRMKESLEEMIKQREFLWTNSYDVYDEEGNPSSTFPNSCYPGVLSTSSTSMIPQMSSTDMTYTKLDFEEKKGGRRMNGLGYAPVCSSSVLSKTCIFRVYGITAPFFKKVMNEKQNLRLKRNVGLDYVHTFLSNMNMQSSIWVLYLAYCGLHLAQIGLLEGIYHATSIVCEIPSGAAADLWGRKRCMILSNLCIAVSCVIMLFSKSFGWFAVSFAVQALGNNLNSGSEEALVYDSMKCLGQEEHYMGVYGRLNVLIEVAQGLATVAGGVLAEFSYFWCYAACVVIAVLALLPVLWMAEPPQCSKAADTAGGSAKDAPAEGTPAQRTIWETVKHHFAVSACILQKDARIGKIIGFYSVVFAAHTLLFFYSQQYFADFGYNKVQISVIMLLVGGASCFGALASEKMYRRFGKRCLIPETVIIAAAILCYGAGKAGVTAAALMCAGFANAALYPIHSDSLNALIPSEQRATLISVDSMCFSIAMIVLFPLAGAFADRWGLKTVLLLLGAILLLFLLAAFCIEKESFSSDHSMLKLEKGRPADCAGRLGKEVRTYDFLDKLNIEYERIDHEAAMTMEECADVDEALGAMICKNLFLCNRQETTFYLLMIPGDKKFKTKDLSAQIHSSRLSFAKETYMEELLDITPGSVSVLGLMNDREHRVQLLVDRDVLEGDYIGCHPCINTSSLRIRQKDMWEKIVPALEHEPVFVTLEEPQEMKKKMQINKKKEERRGTQEKMSKVEKTARPAKAEKPIKATRPANAEKPIKSAERADAVCPYAKKCGGCDYQGMPYEKQLKEKQAYVQKQVGNFCKVLPILGMDEPYHYRNKVHAVFDIEKKRGSRPGARGNGKAANGKQGNGKNGRLAAKPAPGGIISGVYKAGTHEVINIDACQIEDELSSAIIRDIRGLLHSFKIKTYDEDTGYGLLRHVLVRRGFHSGEVMVVLVLGSPVLPSKNHFVKALRELHPEISTVIVNVNDKRTSMVLGDKESVIYGKGYIEDTLCGCMFRISPKSFYQVNPVQTELLYGKAIAYAGLTGKETVVDAYCGTGTIGIIAAKSAKKVIGVELNRDAVRDAVKNAKCNNVKNIEFYNADAGQFMVEMAEYRADAKRGEKSGADEVDVVFMDPPRAGSDEAFLSSVVTLAPKRVVYVSCNPETLARDLLYLTKHGYRAQECQPVDMFPWTKHVETVVLLSKGEVDSKKIRVEFSLEDXXXXRISGWGNLSADQGVCVGAYRVKGVQPLYLTDMEHTGLKVSNLYISQIKRKCGIGVGKNYNLPKSEDSRQPQCPQEKEKAIREAFKYFGMIMDRLISCEFNMDTACVELKFLDGSMIAIDTIAVENEVADNMYQRSELDYLIYNDPVGYADLILNGDPEIYLKTVTECKPLDMNVKNRKCIRKLSLKSLYANRRRNLIAIFAIALTTLLFTSMFTIVLSLNASYETYQFRQVGGYAHGTFKDVSPEQAERIAAHPKVKSAGARKVIGITADGVFSKTPAEISYMDANCTKWSYATPTTGRMPESGKEVTMDTAALQLLGVTPELGAEVTVSYSITDKDQTAFTVTDTFTLVGYWDYDELMPVHYINISRDYADDIEAQAVKTGLQPFRTDLNVMMASSTNIQGQMEQVDTDLGYTWDSYTDPNSVRIGVNWGYTSSQLESHLDPELVIAIAAFLLLVIFTGYLIIYNIFQISVAGDIRFYGLLKTIGTTPRQLKRIIRQQALLLCLIGIPAGLLLGYGIGAVLVPVVLRSTQLDAGITTISTSPVIFVGSVLFALLTVLLSCSKPGKMAARVSPVEATKYTDAMQTKKKQRSTRGAKLHQMAFANLGRNKKKTVLVVVSLALSVTLFNALCAFVGGFSMEKYVSFMTCADFIVSTPDYFRYNPADEFITPEQIEEIAANTKSSLSGTGYAVRKPVYLWMTEDALRQDYARYESAEQLDSHMSRMEHRGDMVMGDTRIEALDNSLFDKLQVFDGDISPMLEPNNNAIAIAVSLDDYGNLPNPEYYPKVGDTITATYADDVKYIDSRTGELRTEDTPEEYFQEKLYGARDVEYTVCALVELPYSMSYRYGGIGYETVLSVDTAQRDSGGAAIPMLYLFDTADDADEAEAEQYLSKLTAGEFSPLMYESKATARSEFAQFRQMFLLVGGILCAIIGLVGLLNFFNAMMTSILSRRREFAVLQAVGMTNRQLKTMLIYEGLFYAMSSVSAAFILSLAVGPLAGKMLGSMFWFFEYRFTILPVLLTIPVFLLLGWLIPCMMYDNAAKCSVVEQLRDAQMEVLQAKNLKKIYGSGNNAVHALDGVDLSVKKGEFVAIVGTSGSGKSTLLHMLGGLDRPTSGTVMVDGQDIFSLKEEALTIFRRRKIGFVFQAYNLVPVLNVYENIVLPIELDGGKVNKDFVQQIVQTLGLDDRLDALPNQLSGGQQQRVAIARALAAAPAIILADEPTGNLDSKTSQDVLSLLKVTSQKFAQTIVMITHNEEIAQMADRIIRIEDGRIVSQNMNKTGIVIILLCFLAAAAVVLWERRKARKTMEEIERMLDAAMTGSFSETNFDESQLSALETKFAHYLSAAEASSQNIAQEKDKIKTLIADISHQTKTPIANLLLYSELLMEETLPASAKANVEALYKQSEKLRFLIDSLVKLSRLENGIISLSPQPTALQPLLESVVEQYTAKASEKGLSLQMQDTDAFAVFDFKWTAEALANIVDNAIKYTEHGTITISAVSYEMFARIDISDTGSGIPESEQAKIFARFYRSNSVQKQEGVGIGLYLARQIISGEGGYIKVASVPGKGSTFSIFLPKMEQLLIVEDDIGLNQGLCKALKADDRQIISCHDLKAAREQLLCGGVSLILLDINLPDGSGLELLREVKENIPGVPVILLTANDTDLDIVDGLERGADDYITKPFSLSVLRARVNTQLRKQASSHKNAPIHMDLFHFDFEAMTFYVGDSKVELSKTEQKLLRLLVENRGRTMTRGDLVDRVWTDGAEYVDENALSVTIKRLRDKLGAQKYIKTVYGIGYSWVTKDEMLSDFSWDMTGYIPKHAVNPHGDGIIPYAAERIFQLEPEPPAVGNLNEYILSALQEKNLIYFSFFLHHYEPQLNKRIKDFLGVDGGDLYDTDRFIDIKLSCREQMLQKLMDYDLAKGAEYATYIFPFIRDAMLRFRMGEEKWSVSSLTNYKMVRSMAWLYHNTKDAVNEFSKKYNCDLALAEEYLKVVRGIRNQQPFYVTDENGEETGEDVALDDSWNYTDILWNGIQAEKVQRAFEKLNYREQTLLEKRLAICMTCGRVSSWKDRPTFEELAVMFEGSTASGAERAYRKAVDKLTELLVAEGAIHAVRLKQKSKIKRKKKIAAAIYEYQADCDGEWGEISLDFENGKAEVILLADWDTVKTNKFASRAIAYLLNCENEKLPKEIMVVFEMNRKELSQNHWKYYLMLEKRFVESIEFVELHEDNFDAFSNGYALLIQAIGAELDTVFKEFCGFNTTDRKTVADYAQYILTNTPDIKNQKISVQEYDIEIQPFMNWDITQPAQSLQWWGAFTDVKHNRYEQLKQAKQENVLNILGALYLIEMLYLKKITDGTDEFDVFDESSNLFSLKNWTSKAVPLSQAFAVLSDMMDDENNTTNKKFDASVQYVSVIRPGEKVAKLVKRMHYVSFVGMFRSDLFEGLCVGHAPKKCKICGKWFLTTNARHTKYCGGYAPGDKLHRTCRQIGNLKGREQRELADDHPVKQIYEKRLNTINRYVKRGTLDADLAEVMKKLAKDKMLRALSNVAYAKGAYEKEMDQAALKKEASAKIYKERDKHEMKKEDAVAAGLYKVIGKEIDDRYMEELKKQSIHPEVIKEMAKDIKIVYTPLHGTGNLPVRRVLKELGFEQVYVVKEQELPDGNFPTVSYPNPESPKAFELALKLAKEVDADIVLATDPDADRLGVYCKDTKXXXXXXXXXXXXXXXXXXXXXXXXXXXXXXXXXXXXXXXXXXXXXXXXXXXXXXXXXMETIVTTDMAKAIAAAYNVKLIEVLTGFKYIGEQIKFFEQQHTYHYVFGLEESYGCLAGTYARDKDACVAVMMLCEVASWCKKHGKTLWDAMLDMYEKYGYYREGLETKTLKGIDGAAQIQSMMSEYRTNPPKELGGHRVLAVRDYKEDTRKDLVTGEVTKTGLPASNVLYYELSDNAWCCVRPSGTEPKIKYYFGVKGTSLADADAKLAALKEDLLKMYQYGNLSDFEFELLCRDIMERKLGCPLRCFAPGRDGGVDITETRLSGCHMVQVKHYIDSPYRTLLSSLKRELPKVKQKQPEHYYVCCGKKLTAQNISEIYQLFSGYMDDAEAVVDLMEIDRFLHKKENADILERHYKLWLESTNVLERLGNQDIAIDCDAFFYQIEKEQKLFVKTKYYEEGRQILENEHMLVLLGDPGVGKTMLTKMLALTFAAEGYRIRYTTNGELSDLKRALSADRERKELIVLDDCLGQHYFKMQETKENELLALVKYIMRNPAKLLIMNSRVTIFHEAKERSCDFRYFMEDENIKIRKIEMNGLDEEEKGRIFYNHLYFAEIPKEYYRNVYEDRRYRAIVRHVNYTPRLIEFVTKKKNYEQAAPDHYAAFIMDCLENPRELWKDEFTRKLGPEDRALLLTLYSLTDTSVEEPVLVRAFLKRLSDLEGMDTTRNLYEEALRRLTDSMVQMIEQNGRKRIGVCNPSINDFLKNYIRENPMEQANMPAYATEYVQLERICPGCVEELVRNGRIYQYHFRMLEAKRGKILGVICDNSIRDMCHMEFVQAFLEEPGSCYTKKGDRSEEILFALLQEKMDVFYHTRAKLNQETLEDFLMERGLWEYQTIAREAKKTGGEWLFTKYRKSFERGLQNAVETYARDVDQSDYYDGYDVNTAIEESTFYNGEALECDFSSVALEWEEYIREDIYNEIMGIVNKFPVEIAAQIVYDPGDADISTGLIESYLEDWTKPDDYNDDLGRLVPGGNETAGGGGMLDVIFRGKRMENKNSCKENFEMAKTELQDMEAIADFFSNPMIKSGMEMLGEIPGIGSLAKNLLEQEVAGFQKRKREEFLSYITESGELIAKSDVADVPFLMELARTLEVLNRLATNEKVLYIANLFKHTFLLAGDRDIDLYEENLKRLEELSIREITILAKLHQYKYNNEAFYEDIRKDCGIEKDEVKNILSAVTRTGFCKEKVGTYLGYEGDVYYTTSLFESFLKCIGVCAEETESERDGMGESFQKLNLTNAYLFAAAMQDEEICRNVLEIALNKRISRVKAHVEQVLFLDSEFKSVRFDVYASDEEEVSYDVEMQNDDTKNLPKRCRYYQAELDVTSLRPGEDYQQLKPGYIIFICSFDPFGKGRCQYVFEEYCKEADIPLGDETQKIFFNTNGTDTENVTPELLHLFEYLKQSTEEVAVRHQDEKILKIHERVKYLKRDRKLEAGYMTMEEYIHQEAERRAKLMAESMAESMAESMAESMAKSMAESMAESMAASRVAQNILALLEDLGTLPDQTKERIAKEQNEDVLSAWLKIAARADSIEEFQSKMMQEKRDIFDRMMALPILNIFEPFYKKNKEVLLYLFFGGLTFIVSIATYAVFNVSMGINELIANVMSWVLAVLFAFATNRVWVFQAPTHTITEFLKQMLSFFGGRVVTLVIEEIILLVFITWLGFNSMVVKVIAQVIVIVLNYVISKFFVFSDKKMSNYLIGDYIRDTRLRRGYTQEQLSFGICTTASLSRIETGAQAPGKHILDALLERLGIGDKIFDVLVSKDDMVIFEKIQDVTRSIARADYDQLETQIEELEQLVEKKNRSNLYLQYLTFAKGMLRYGRGGTYEEVVKLFMDAIHMTLPNFDGVTPNENNLLTFHEIAIIDNIATMYAEMMEQALRLGYWLKQYMEIKFVDGKEKTARYPMILYNLCNWLGNMERYEEAKEIAEIGVNFCIEYGNLVAFPRLLFNKACALATLGDRKEATSIFKQSEAIFAATNQMRMAKLTADLCKKHYGIEIMKKMILIAALTLVLAAAAVPGVAASFAENAGVNACFFLGDLHECYMIECVMLDTLPEKANLILNILWDRNHPMSVTELIEALKEEFSLNCEKEEVQDYLRFLLASDYAEKKRKGLKVLYAALGSEYTLMKKKYYLEAVRITAVLLVMYNHSAPFMSFATQHGVQYAVSFFLSLVCKAAVPLFYMVSGALLLGKNESFGELARKRILRIVAVIVIFSLLYYLKFAVRGQASVSPIRFLLGLPFDVAFLPYWYLYSYLGILVSLPFLRPLAQNMPKNAFWYLIALQIVTESLQITLGFFGYHTLCGYFSVAGVLQTTLFYPVIGFGLDRYLKEQSFFGWKNILRNLAFLAAVVISWRLVYRDWQTNGGTYREMYLGVWMPLITLVIFVDLKLLFQREDLPEGLKRFLSMVGGCVFGVYLLDGFIGAGGRMDVIYQKFMPYIGYLPAFLIEIFVLFGIRVALTWVMKKLPVFRRLLMLISLIVPCYNEQEALPIFYEESTKVLAGMNCEYEFLFVNDGSKDATLSILKGLAEKDEHVTYLSFSRNFGKEAAMYAGFTNARGDYVAVMDADMQDPPALLPQMFAMLTSGEFDSVATRRVNREGEPPIRSWFARQFYRIINRISDADIVDGARDFRLMKREMVDAIVEMGEYNRFSKGIFGWIGFRTYWLPYENVNRVAGETKWNFWKLLKYAIDGIINFSQAPLAVASWFGMGMTLLSFIAVIFIVVRKLVFGDPVTGWASTACIITFIGGVQLFCMGIMGQYIAKTYMEVKQRPHYIVAESNRAEVTRIKMKKRAVTLLTLLAVSASLMACGGSDATESSAENDAEQIEAEVTGQTENADTEEEEVLPEGKYRSELTNELIDESLKDQRPIAVMVDNESIALPHYGLSHADVVYEMMNSTLNGRITRFMALFKDYESVDQIGSIRSVRPTNVILAAEWNAIICHDGGPFYVDEYLDEACSDHFSGTFSRVDNGKSREYTEYILSGDMDKNFSNSDVSKDYTSYYEGAHYQFANENNPVDLGTSYPDDAIDANMVDLPFPHNGSYLEYNADDQLYYYSEYGKAHVDPGNDNAQLCFKNLLIQSCGYTQYDEHGYMIFDCISSGYGYYVTNGKALYVSWKKTSMTSPTRYYDAQGNEITINTGKTYVALVPVDDWEDLVIEMEEFLSFIADILEVDKNTLTLETSQDDVETWDSLMQLRLLGEIEAKYGVMIPMERISTIKKLNDFYQYIKESMRLSILSNVNLDMLSGLLKKENEVFQTDGYGEWITYALKKDERLAAFAPECLFLLLDGNALLEGCQDMGSVKTVLDRSEQYIEKLAENYSASYLVVSTIDVRPEHIGAGDASDLAQASGAYWDTLLTGLAERQKNIHRFELRRLIEDYGRKQFYSAKFWYMGSIPYDMKALHLLAEEMRHVMARLVRVPKKVLVLDLDNTLWGGVIGEDGPEGIVLDSAHEGAIYQDTQKQIKKMQQQGVLLAIASKNNSEDVQSAFRENPHMILKESDFSAIYADWNPKPVNIGKIAEELNLGLDSFVFVDDNEAEREAMRIQQPEVTVVDFPTDLTTLPAVMAEVYENYFFTWHLTDEDKAKTMQYQQERERRKERESAVSYEDYLRSLQTTIRLAPVNDNTRERAVQLMNKTNQFNTCTLRMDELALEHYLGEEGGHLLMAEVSDKYGNSGWVSEFLYHQDGDTAVIDNFLMSCRVMGRKVEDAILDAVLKKLQADGITRATAAYKKTAKNKPVEALWEQLGFTQVSGDEEQKQYERKLTSLPETEQIHTVVWDVMATSFYSDEELQQMGFAHVGHDVMISRKASIYGASNIWIGNHVRVDDFCVLSGKITFGNYIHVAVTTTLFGGTAGITFEDYTGISSHCAVYAASDDYSGDFMTNPTVPEKFTNVIEEPVVIKKYSNIGAGCIILPGVTIAEGCALCAMTLATKDTKPWGIYLGYQCIRIKERSQKMLELDISELEADMNVDHIGYAVKNIDASRQAFEELGYVFDPVVNDTDRNIFISFGRLGDYRIELVSPLDPALPSPVDGTLKKSGNTPYHICYTSSRFEDDIKELQQKRFLLTIPPAPACAFDGRRVAFLYHLQIGLLELVEAMKKRFLYLRYYLKHLHHKFRAKRGGMYSIMHTKFLGKMPPSDEEANHLIKEMITSGKPFALCRLGSAEFTLMQLFDEYQLFHHDRLHQSNMYTLFHKDMDEIARWVNLTKEDCRDVDIMAYFEDHPMEEYLIRSYCQNSRLIRLEQIETILYDVPWTMALEGKKVLVISPFVDTIREQYPKIDKIYEGRKMLPSFELKTLKSVWFSGDREDDDFDTWFDALQYLYDEAMKIDFDIALLSCSTFGFDLACMFKRAGKQAIQYGGALQVLFGIKGARWDNYPPYSKYYNEYWVRAPKTEAPSKRFANKLDNGCYWMKHERSSNFELLRLLCIFGILVMHTFAGIDTAASPGNMLANVFANSLFNTGVTCFILLSGYFGIRFDLKKLIGLDLMVIFFTVVGTVALGDFGVKDLIKSCIPVLSRRYWFITCYFVLCILAPFLNQMAERLEREHFRRLLLLLLLVFSLIPTVTTYDVMQDAGKGLAHFVMIYLLGRYLARYHTGHCSKKQLLLGITGSTALIFCADGALTLHQGVIYSTFSRDCSIFIIFTAVLLLLLFREFSLQSRIINRAATNVLAIYVLDQVIRSLLGRYLDLNAFSGQWYLFFVVCGYVLLVMLLAAVCNELRKLTIGRIEPWLAGIIAAFLQACGALLIRTGQRIVHWFISMDMSDIIPVIVHHETGEKPQTGGKKNQEYLRYCIAQAKKYNEKVVLLGDQYNKDWCDDWHDANDFITDKWKAFHSVFKNLSPYPQAWAEGIFRRFFLILEYLDRYGYDNCVIMDSDILLYTNVSTYEPFRHCKMAAESPLEQDIAVLWKGNGYKWKVCAGVAYFTKQGLIEFTDYCIDMYKNHMDVLMEKWNIHQKYQIYGGVAEMSLLYLWVKTLPEGEFLNLLMDDANHCVFDNSIGLPDGYLEGQYEFNRRLGVKKLHWEDGKPYCYTLDGHQKTGLLCLHFVGVTKIFMEGIYEHQDYAFGARFYTYLLTIRGHLADIKHGNTRFQQRIKIRRAEKASKASNNMNDRVVCVMSVGAGKYRKQYELVRDNLMAYAKKCHADFRFIDDYIDKDKKRDIYSQKLLIPDYLREYEQVLFLDLDIIISPDCPDIFALMPENIGLMAEVNPRSSARFRKIYADNERILKETVEDYFTSRGFAAADGLVGNINGGVLLFRPRLVADLFRDYYMSMKSQGENTAFEEAPMAYYTQTKGLFLELDYRFNCMPYFEIGNPYADRLYALHQNRLYGKAEHVLSRLTGEKHMLLLGAHYKLIRRLFDDGAYIVHFAGGYWNTHLYRKCMKHLWRMSRILVTRSSMPEYEEYIEEIKDIWDSHWLTNMGAKHNELEKELEKYLKVDHVSLFSNGHMALELLIQALHLTGEVITTPFTFASTTHAIVRNGLTPVFCDVNPEDYTMDVSKIEALITDKTSAIIPVHVYGNLCDVEAIEAIAKKHHLKVIYDAAHTFGVTYKGRGVATFGDASMFSFHATKVFHTIEGGAVCFNGEQNGLKEDLYGLKNFGIRNEVVVDAVGANSKMNEFQAAMGLCNLRHLDGEIEKRSRVVARYREHLSGVPGIKLVQPQKDVKPNYAYFPVVFDETVLGYGRDDIYEMLKQHDIFTRKYFYPLTSEFQCYSDRYDAKDTPVALETSKRVLTLPLYADLDLSDVDRICELILGYRAMIIVKIGDGMGNQLFNYACGYAAARRENDTLKLDTSEADNSTLRDFELDKFHLKYDERESFPNRTVFQKIYKRLRRNLKYRVIKERDLHAVDPRVFQKKRFRNKYLHGYWQHTGYFEPYLKEITDMMTPAYGQSELVKKLCAEFQTTDTCAVHVRGGDIVGPGRAFFERALVRMEKERPGLRYLVFTNDKEAAKEALEGEHTERKMTYISELGAFSDIDEFFLMAACRHQIISNSSYSTWAAYLNPNPEKVVIMPEYKGCEQIRLKEWIVLMNLVKSVFKVFDGKQKRKLFGMAFLILINSGVSLLGVSVLLPFIQAVTAPEELLANRYVAAFYEWMGMENPNELITAIAIGIVIVYLAKNAFIIFMNNMQYRFSYYGKREMQDRLMKYYISKDYTFFLNHNSAELMRDINNDPEMFYAAVLNMLQLAAELCTSTILIIFLVVTDPIITLGVALAMMLMVLLFMKKLKRTLARFGDERRKYNANIIQCMQQAFGGIKEIKIANRESYFEEEFRKQNGLYTYVIKQNAFLSSIPKPVMEALCIAGLMITIAVRINMTESDPTHFVGVLAVFAAAAFYLLPSANKMSEYLASIIHNGVVIHKIGEEYTKIRDLEIDLSEERDYPAMALERAIRVNDMTFTYPEMEEPVLSHVNVTIPKNSSVAFIGPSGAGKTTMVDLILGVLKPQEGQITLDGVDISTSYRGWHDKIGYIPQTIYMLDDTIRNNIAFGKKEGINDEDVWAALRQAQLDEFVESLEEGLDTVIGEAGVRLSGGQRQRIGIARALYRKPEVLVLDEATSALDTETEAAVMQAIDSLQGKMTMLIIAHRLSTIKNCNIVYKVENGSVTVQDAQMIIIEPCAGLGNKLLGMSSAYAVAQKLNRELIVMWKREVGCNVKAEELFDLPFRVIEISENGYSKEPVAHFRGNQLKKKWRAKADRFLECGDVEAIKKQKGYEGLLAVIEKEPVIYIKSFGPLCELDAASLAFLKPSAGILQKGEPLFSQLGAKTVGVHVRRTDHTEAIANSPLSLFADKMRQEMTEVPGTDFFVATDDEGVKRELREALPDAKLIFHDSGIIDRNSKEGICDAYIEMLALSRCRKILGSYNSTFSLLPSYIGDIPLEVVKKDMIEMKCCDILGTRILVTNMADTVERIEHDMEELRGKYICVGNVHTTVMAHDDAHYHEVQKSAAFVLPDGKPLSVYSRKHGFPEAERVTGPDLMLELFARENGLKHYFYGGSPETLQMLEQKLKERYPHLQIAGMVSPPFRSLSEKEDAAEVEKINASGADIIWVGLGAPKQENWMYDHRDKVHGVMIGVGAGFDYHAGNIKRAPMWMQKLSLEWLYRLMQDPKRLFKRYLVTNTRYLWLTRTKRQMCGIYGVINRKVRREQAMECLDTMIHRGPDGFGLWQEDGVTLGHRRLAILDLSSAGSQPMSYANERYWMTFNGEIYNFIEIREELQHKGYTFRGNSDSEVIMAAYCEWKEKCVDRFNGMWTFAIWDRQEKSLFLSRDRFGVKPLYYTEFPDGGFAFASEMKALLPLLEKVEPNKEMFDRYFADNHYESQPECLIKGIKRFPAGSYAWIRNGKTEITRFWNTLDHLIEVPDTYEEQVEQFRELFLDACKIRMRSDVTLGTGLSGGLDSSATICAMSYISRNCADERANKDWQHAYVACFPGTDLDETKYAKQVTDYLGIRHTFLTIDDAVPEREFLRQLYCFEELWGNPQVPMMELYKKERELGTTVSLDGHAADELFAGYGFDVLKAYPDAKGKAEIDQITMAYLNQRSEMGYDPSSAEFKRQRNKLYRDYMTKYYAKKLLGRADVSSAYADHPNWKKLDNLNKVLFVSTHETILPTLLRNYDRDSMASGVEIRMPFLDYRIVEFAFSIGWKSKLHGGFSKSIVRDACADFMPHDIAYRRTKLGFNAPILDWMRGPYRQFFEDTVADPAFANCSLIDDATGVRADLAKFLNGENATFHQAADIWNRIQPYLWERALIRQDWRMKHWKYLDVARGIGLLLVIISHSCGLSPYLINYYIPLFFVVSGYLYKPGRSYGENVVHKAKRLLVPYFGYSVLLLVFYRAIGRTWQETGRSALGVLYSRYCLFDTTTHQDNVFLFTVANGAMWYLTAFFVTSLVYHLVIDRCLKSRRFLIGCLVVLTVLTMLLAELPVLLPWSLDLAFVGTIFMIAGTLLQRADFFDRDWNLWVIIGILVFYLSLSRANPGINMSVREYGVYQAFSVPFFILIGITGSMLCIWVGKAFQNCIVGTVLAYIGQNTIVLLALHILGLEIFEMAAAKFINIGELTGAAFVLYHTVRVTASVCGCLLFGKTLDGIKRALHGKHRGMEKTVKKGRNSSIELLRIVCLVMIFWMHAADSGVANGIGAWIDIAVAVIGNIGVSCFILISGYYGIRLDVKKMMHLECMLLFYSWMGLLFQYVWGNALGGEEILSYLLPVIGKRSWYFTCYFALAFLSPFLNEMVEKLSEAHFRQLLITMLVIFSGVTTFFFFDINSDGGKGITQMVMLYLIGRYIGVYRADRQYNTAKLAGWFALLAGVNFCLNGALYVVTGTVQNRFARDNTLFTIFEAILVFLIFRNHHFENAFVNRLAKHVPAVFLFEWTLRGFISHYMFDYVARSGENTYEFLLLGIALLLVVMGSVIDWARVTLFHVPEAWCVEHIYRLGDRCVHKIKSKRMIAYFLGGCSIYGIVLFVLVMLRPKSALHTKKLTDCGRREKITIGVVLVILILLCTLPMGLAPGWNGEDPGATNQYELVAEAILNGHINIDNGDVDPLLLQMDNPYDPQARVDLGVDYRWDTAYYHGHYYMYFGVVPVFLLFLPFRLITGMSLTTYHATQVFVAFFICGVFANFYMMSKRFFKKITLGMYLMLASAFSIMSIWYSVDAPALYCTAITGALCMEIWSLFFFMRAVWVEEDEKKSIRLAFFGSLFGALAFGCRPPVALANLFVIPMLVVYLKKHKFTKKLFGELVVAALPYVVIGILLMCYNYARFESPFEFGQAYQLTAADQSSYGSIAFYFSQTKMIAVANAVLYNFVNYNPICEAFPYVIFNGILLNFPILWFAVIGLSPEGVLKRMKEQQMRAFIVMLFVIPLVIAVMDALWSPFMTERYRMDQYWIMGVLCFLVIGFYHDNLSETAGRKFSCFISLWAFITIGKSILLYLVQNDGNVTYTYPEVVEQIKMILRLGIGAGMDKIAVLIPCYNESRTIEKVVTDFKRVLPEATIYVYDNNSTDGTDELARGAGATVRYEYRQGKGNVLRRMFRDIDAECYIITDGDDTYPAESAREMADQVLERRVDMVVGDRLSSTYFTENKRPFHNFGNSLVRKSINTLFKNDIKDIMTGYRAFSYEFVKTFPVLSKGFEIETEMSIHAIDKNMFVENVVITYRDRPEGSVSKLDTYSDGFKVLKTIARLYRAYKPMGFFGIIALILAVIATAFFIPVMGTYLATGLVPDFPTLIVCGFTMLSAIQSLFVGVTLETMAQKNRQDFEMQLQRVTAEKKRLCGEKNDADMLHYAGSNLKENYYEGSAVPVYIEKQTGVPENAISLSYGSWEIELTYETENETNCTSYMQTAHGEDYGDTVVLLKEANEKKFDLMLYGNVTEFYIVSNEPTLNVHSITVRETNQWNRMMYTLLVLIVASIDLFLWQKQHKKWKNLSNEKKTVCLAVLFIGIVASIPLFTDYLISGVDMNFHLMRIEGLAEGLRNGDFPVRMQPLWINDYGYPVSIMYGDLLLYIPAAFRLAGFTLQTVYKLYIVGINILTAYTSYKCGKKVSGNYRIGIVMSLLYTLSGYRLTNAIYRAAVGELTAIAFIPLVFLGLWQLFQEDDKTKWYQSGVLLVIGYTGILESHLLSFEMVILFSALYCLVNGRNFWRRLKMLFQTALFTIGVNLFFLVPMLDYMLTQDMQVLNGSTVDMQDYGLFFPQLSQMFTFATNGSQLGILGPTSYGIGNEVLMGMGLPLAIIVCLYLWEQLVYKNERIEHSNKVFGLMLLSMWMTTYLFPWEILENIQGIGTLVAPYQFPWRFTGLTLGLGIILGSVALKNVQIVVGDTTKKVIIASISILAIIHFTSYSEMLIANAVPVKITSYAGIDTREAVVAGEYLLQNTYAMTIGAAEPQTEDGMTINNYKKEDGIVTLLYENLTGKDSYIKVPFFSYKGYHAVDSASGYELTIWHDWQNIAMILIPVDWSGELKVYFEEPIYWRVAEFISFTLVLWSLMHWVKIRWKKYLQRMRDSFFEKYKTSEVTNTRRVINTPSAFTREHFFYIQEAGYLKSLKPHMSKRSGLQSYLFLIVLSGSGEVAYRDTAKPVPATGSDMGRRSGTSAAGDGGNGSLATVHAKAGDCFFLDCRNEYTHISSEDDPWELMWIHFYGPQCDAYYDYFLKQQTWHFHTAHLAELTAAIQSVIRFHEEPTDDTDLLTAQQIVNILTLICIEANEKGNTDSVLSDKLKSILHYLDEHYVEDISLDLLAERFFISKYYLSHEFKKEYGTTIIQYILTKKITTAKELLRYSNSSIEEIARLCGIDDASYFNKVFKKMEGCTASEYRKRWMSKKALITGVTGQDGSYLAELLLEKGYEVHGMVRRSSTEKRERIDHLEGNPNFHVHYGDLSDSMSIMRLVGMIKPDEIYNLAAQSHVGVSFDVPEYTADVVATGVLRILEAVRLCGLEKTCRIYQASTSELYGKVEEVPQRETTPFHPYSPYAVAKQYGYWIVKEYREAYNMFCCSGILFNHESERRGETFVTRKITLAAARIAQGKQDKLYLGNLSSLRDWGYAKDYVECMWLILQHDKPEDFVIATGVQHSVREFCEYAFREAGIELEFKGEGMDEVGIDKATGKVVIEVSKEFYRPTDVVNLWGDPTKAKSELGWNPTKTTFEELVKIMVKHDMELVAKENMMEKDAKIYVAGHRGMVGSAIVRQLEKEGYHNIITRTHKELNLCRQEDVEKFFAEEKPEYVFLAAAKVGGIMANSEALADFMYDNMTLEMNVIHEAWKNGCKKLMFLGSSCIYPRMAPQPMKENCLLTGELEKTNEAYALAKISGLKYCEFLNKQYGTDYISVMPTNLYGPNDNYHPEHSHVLPALIRRFHEAKVSGAKEVTCWGTGTPLREFLYVDDLADACVFLMNNYSGDETVNLGTGKELTIKELTDLVAKVIGYTGEIKWDPSKPDGTPRKLLDVSKLESLGWKYKTELEDGIRLAYEDFLNNPMRAERMYIVLLSGGSGKRLWPLSNDLCSKQYIKLMNHDEEQENREKCSMLQRVFGQLKNVGLSENTIVCASSAQVELIESQLDGAAEVAVEPMRRDTFPAVMLSCAYLLSKKGAKEDDVVAFLPVDPYTTGEFFRRIKLLGDKIAASEDTIGLLGGVPTYPSTKYGYIVPEQGEGELLKVTGFREKPDEATAEKLVSDGALWNCGVFCFKLSMAAGWLAKYGVGVDYDKMVADYEKLPKKSFDYEVLEHWERIVAIKYADLWKDLGTWNTLTEEMPENSIGDVTWDDTCENSHAINVLGIPMVVMGAKNMVIAASHDGILVADKHQSSYIKDCLSHISDTSKYEERRWGTIKTIDNDEDNGIKSVTKRIKVVAGKRTPESRHMNHTQTITVLSGMGKLILEGVEVDLMAGATVSIAAGKTYSIQALGSDLRCIEISISKSKENAMDTNDISACEKLVMKVIWDSTEELALQEVMDGVNHENGKNWKPQTVSTFLSRLVKKGFLNMYRKGRYCYYQPLVSKEDFWRATMEESAKFFTKGDLGELACCLCDDMLDAKDIEKLKKKLNEHSMNIANQILFAVVITSVTGTAAYGLWRLLMNSRFCTKPQYVYLALFLVCLLYLIPLDYGWMQMTIHGYLQKEGIWQINFSLTGFLWILAFFAAVCWLALMAKGITEFAGSLRGMKRIQMRDIPEEEEAVREEFARVKKKLGIRSNIRLYRNDRITSPMLAGIFRCRVVLPDIAYDRKHLSVIFHHELMHYKSHDPFVRLCGMCVTAVHHINPLTGNLMALLDEWSEIYCDARAIAAISDEMDAGCYFEMIIESVKHSPVTDENYIFSMLYENQRRLERRIEYMGKYNGKAASRLASVCFAAAFVLVSVTPVYAAGSEAADVHDDIYQNVEALTADGSEENVLEEQQILGVMDRSYDTLEYAYPELEVISPLLSANEMATFNWNVSPGTRMVSNQFWVTKGQTIHIGSTAIPDSSTYWIGIMDGLNNARYVEGTGNLSHGFSITSSGHYRVFVQNKSSVQINAAGSYYFNMMRFKHLFSTVIVVLFAVVLAACSHHTPVESKKDSTGYTPDPATEYLVTQYADATGVQGTFYTITNDTTLIIIDGGWADNASAVREVIAAHGNHVNAWILSHPHQDHAGAFNQIYASPDGITIDAVYDNGFDYDFIEAAGEPYDDITVMETYHTLTRDASNVTHLHRGDVLSICGLTFSVLNAYDDTVLQNVGDEKDYQNNASLLLKVSSVNSSMLFCSDIKYDMNDSLLVACKDQLACDYVQTGHHGNWSFSEEFYDAAGASVYFIDAPSSITDNADFPASTLKSDLLAKGKTVLDFSTAPNTVTLKMDTHKFFVEKMRFHLKEQDTLVFVGWFFDGSTKEHSIKAYLDNRELPLTVQVNRGAEVRQKYIRSINEIEEEVVGIIKLPPDWRNGRRVTLMAAYREEYKKSYAISTAKLGRLENEVSYYVENCHREGSQITVTGWCMSAGDIKLELLDGSRQPISEKVEHYYRKDLLSVFPECDKEAKPGFLVQGTAAGGQSGPFYLEMRGAKNHSRTRLTKWDEGTKLQYVIEKAGDTVRYLERNGISATAYKIKSKLTHKEGNTYENWRAKYLPVPEELQRQREDVFDAEPLFSLVVPLYKTKPQYLREMIDSVTAQTYGNWELCMALAASGEEDAALISILEEYAGRDARIHYQVLPENGGIAENTNAALVMASGDYLVPVDHDDLVPENALYEFASAIRRDDVIDMLYSDEDKVSMDGRHFFEPHFKPDFDLDLLCSVNYICHLLAVRKDVAERAGSYQSAFDGAQDLDFILRCSEQAKKIYHVPKILYHWRCHMDSTASNPESKLYAFEAGRRAIEEHYRRLGIPARVENASFYGMYRTVYEWKEEPLVSIIIPNKDHAEDLKLCLDSIFTKSDYRNFEVVIVENNSTEPETFAYYKELEAGHENVRVVYYEGGFNYSKINNFGAAACRGDYFLLLNNDTEMIDGGCIREMLGYCMREDVGIVGAKLLYADDTIQHAGVILGFGGTAGHAFIGKSRYDTGYFGRILCAQDYSAVTAACMMTKRQAFEAVGGMTGELAVAFNDVDYCLKVRKHGWLVVYDPYAEMHHYESKSRGYEDSPEKVERFNGEVEILLSRWRDQIEQGDPYYNPNLTLDNSDFSLRRMMKVYICPSCGWMRVVSRRKDVECYKCSEPQMVLAKMDFGKYTEMSEEERKDYSDGWLYIHQKKHMDGFTSIRRSIEHMKITVQKVIKGVRYLKHYGVKEFFIRLQEKMESENVPYEPWYEHHKATEETLRRQRKQSAAWKGAPCVSIVVPLYCTNETFLREMIGSVQAQSYENWELCLADGSPEENAARLEAVVRKCAGEDARICYRRLEKNLGIAGNTNAAIAMAHGEWIALLDHDDLLAPDALYETVHLILRGPKDETGVAATGFRKAGAQYDMIYTDEDKVDMDGKTHFQPHFKPDINIDLLRSNNYITHFTMMRKTLLEKAGMIREEYDGAQDYDLFLRCVECAEAIGHVPRVLYHWRCHTESTSENPFSKQYAVDAGRRALEDHLKRQGIAGEVTATKDMGFYTVRYPYSGNPLVSIVIPSRDEVETLKKCLAAIQKTHYANYEVIVVENNSAPETFDFYRSITSEEVKEGEAVCYEGTLSGGQRICVAVWKEGFNYSALNNFGVSFAKGEYLVLMNNDIEMITEDWLEEMLGTCQRREVGVVGAKLYYPDDTVQHAGIVVGIGGNARGIGQNMFMGLQRARSGYLHKASLAMDYSAVTAACLMVKRSIYEAVGGFEEKLAVAFNDVDFCLKVRKEGYLVVYQPRVEAYHYESKSRGSEDSPEKVARFGREIEYMRNHWIGILKNGDPYYNPNFSTVYPNYALRDYHMASQPEVTVIIPNYNGKKLLENCIQTLERQTCTDFKLLVVDNGSDDGSTEVTSSLDLTMLALKENTGFCGAVNEGIRRADTPYVILLNNDTEVLPEFVEELLAAIKKSDRIFSAGAMMIDYHDRGRIDNAGDYYTAFGWAMARGKGKPLADFNRPCRVFSCCGGAVIYRTGLLREMGPFDERHFAYLEDVDMGYRAKIHGYINCYAPGARVYHVGSATTGTRYNEKKVFLAARNSMYLIYKNMPFLQLLINLPLILSGILIKSLFFLKKGFAGEYLRGIGAGITGCRGCKKVRFSWKNLGNYALIQLALWGNVIRILAGRMIKDNQQYFNKLHVLIDALVIIVSYVFAWWLKFLSGILDHEVGVLSFEFYMRALLLIVPVYILLYYAFNLYTSKRVQGRRLEFSNIVMANTVGLLLMFAALFTLTSYNPQYRNFSREMLFYFYVTNIVVEEIVRLLIRRFLRSIRRRGYNLKHILLVGYSRAAEQYIDRIQQNPQWGYNVRGVLDDNIARGTSYKGVKVIGSIGNLNYILPQNSLDEIAITLGLEEYYKLEKIVAECEKSGVHTKFIPDYGNIIPTRPYTEDLLGLPVINIRYVPLSNTFNAFVKRCMDVVGSIVCIILFSPVMLLSAILVKATSKGPLIFAQERVGLHNKPFQMYKFRTMYVQTEEEEQKGWTKKNDPRVTGVGKFLRKTSLDEFPQLFNVLKGDMSLVGPRPERPQYVEKFREEIPRYMIKHQVRPGMTGWAQVNGYRGDTSIRKRIEHDLYYIENWTLGLDVKILFLTVFKGFINKNAYMSSSGNSRNGAHSSNGAHSSNRIQTGGSGHPQKKPLTKAQKAAIRKKKRQKKIILVVVEILVLLLLAVVLFAVVKLSKIEKDTSFDESDLEFNEGLSSESQQIMKGYTTIALFGLDNRSNGNLSKGNSDVIMIASINNDTHEVKLVSVYRDSYLDIGNSTYRKCNAAYANGGPEQAISMLNTNLDLNITDYVTVDFNAVVECVDLLGGVEMTVTDEEAVLMHGYMDEISKLTKKKSEYLPGAGTYTMDGVQACAFARIRYTAGDDYKRTERQRAVLTAMIQKAQKSDLKTINSLIDEVFGDIKTSYSNTDLIALASQVFNYSLGETTGFPFEKNTITLGSKGSVVVPCDLKSNVIQLHQFLYDDTEYEPTDTVKSNSEKIISDTGFHQGDGYMRVDIIIPTYKPDDTFCLLLQKLQEQTFVIHELILVNTEEALWNEAVRKYPIEQIRKELPFSSRIFHMTRENFDHGGARNMGAGYSEADILIFMTQDAVPADERLVEHLVHALTSGAHGPGTPAKGAVAVAYARQLPREDCGIIERYTRQFNYPDEGCVKSREDIPRLGIKTFFCSDVCAAYRRDLFEQLGGFESPVIFNEDMFFAAHAVQEGYKVAYAADAEVVHSHNYSVKQQFQRNFDLAVSQTAHPEIFEQVSSEAEGMRLVKNTMGYLCKIHKPYLIWKLGWQCVGRYAGYFLGKRYQKLGRRQILKCTMSPYYWKRIWSEKMSNILYIVVPCYNEQEVLPETSKRLREKVQTLRQSGKIDADSRILFVNDGSKDATWEMIQKLHEENSVFSGVNLSRNRGHQNALLAGIAVAVEHADMIVSMDADLQDDVDAMDRMIDAYEAGNDIVYGVRSSRQKDTFFKRNTAQLFYRMLHFLGAEIVYNHADYRLLSRRAAKGLLSFEEVNLFLRGIVPMVGYQSTTVTYERGERFAGESKYPLGKMVAFAMEGVTSLSVKPIRMITMGGLFVCLVSLGMLIKAFVDYANGNVEPGWTSVIISIWVLGGLQLFAIGIIGEYIGKTYMETKRRPRYLIESVLLDAVEQEDTPGREMSKKYKVWIFWALMLIGALLVVSQSSYSDGDDAFFYQYTNSMGFGEYLSWRYQTWVGRMSGEAFVYLAFRLGLGFWRVVNAVMLVLLPMGVLRLSEKAAGIGVHSEEAIGPCAAAVGGYFLMNIMTVGYAAVWVNGSIFYTWCFTCGIWALMPFADAVFAKPEEEPALNKKYFLISIPCAVAGTMSIEQMSAVLLTFEVLAVVALFLRHKKVHPLLLVQTLTTAVAFVILFSAPGNEIRVASEIANWMPEYETMPFGQHVFITIHWLLSSFANENKLFLCGIWVVGILLLLQQEQKKKRDWIALGIAAVFTLAALLPYAGFDLLSDMGMQYINIEACVYQVPSMAVMTREVILAMIWWAAALLFTLPFLWRVSKKHITLMLAYLAGIASEAIMYCSPTMYASGARVYYLTDLLYLFIILTLAFSLKKKRWRNGFYVGLLVAGVWNLVWQVLFMDNNERNHNQSSDSFYSYNNGTNQNGTSQNNGAYSANGAYQNGSAYGQNGGTYQNGGTYQNGGTYQSGTQNNSAYGQNGGTYQNGGYQQQFYQSQGAGNAAYGQNPSGKKEKKRREKRERKPGGFGMKLAKCAALALVFGLVSGTVFEGVHLASGQIFGDSDSTVAATGSVLTQSDSNTKIEATGASSSYVASDVSDIVEAVMPSIVSITNVSESQYQSFFGGTQTQQSTSCGSGIIVSQDADNLYIATNNHVVEGADSLTVAFSDNTTVSAEIKGTDPSTDLAVIRVALSSIDSDTLNTIKVATLGNSDDLKAGQAAIAIGNALGYGQSVTTGVISALNREVTVSDSNSNTNYTAELIQTSAAINPGNSGGALLNAAGEVIGINSVKYADTSVEGIGYAIPISTAMPIIEDLITKEKVDEADSAYLGIGGVDVTSDVAKTYNMPTGVYVTQVKENSAAEQAGIQKGDIITAFDGKDVSSMEDLSSKLQYYKAGTTVDVTIQRSSNGQYEEQTLSVTLGKKNMGFDYKEPVGVKFRNVTGDGKSLKQNSSISSMPRYASDSVSLATLMWAYESVFYQIYPLGFCGAPFENDGVLTHRIQKVSDWIPHIQKLGANAVYFSPLFESDTHGYNTRDYTKIDTRLGTNADFKEVCDNLHAAGIKVVLDGVFNHVGRGFWAFQDVLEKRWDSPYKDWFHISFDGNSNYNDGLWYEGWEGNYDLVKLNLHNEDVIAHLFSCIKGWIDEFDIDGLRLDVAYCLDHDFIRRLRAYCDTLKPDFFLVGEVVHGDYNQIMNDAMLHSVTNYECYKGLYSSFNSMNMFEINHSLLRQFGPDNWTLYKGKHLLSFVDNHDVTRVASILSNEAHLPLIYAMQFGMPGIPCVYYGSEWGAKARKEDGDPALRACFDAPEWTTLTDFISRLAAAKKSSEALNYGDFRSVLLTNKQSIFERKSANERVLVAINADSESFTAHFDAGCGTAVDLLTGKTHDFGGGSTLPPYSAAFWKMEHMFDKIIGFIGAGNMGSAMIGGILNASLVTTGQVIASAHSKETLDTIHSRFSIETTLSNETVAERSDILFLAVKPNKFDEVIPQIAPHVKSSCIIVSIAAGKTIAAIEKAFGKEIKLVRAMPNTPALVGEAMSALCVNAHVTEAELSEVQAIFNSFGKAEVVPESLIDAVVGVSGSSPAYVYLFIEAMADAAVADGMPRAQAYKFAAQSVYGAAKMVLETGRHPGELKDAVCSPGGTTIEAVAALERGGLRDTVITAQRACSKKSHDMSTAKMSEFNNLKLEIADQTAVLSISRPAALNALNSETLDELNTALTEIEAMDDVKVVILTGGPDKKGNEFKSFVAGADISEMVNFTAPEARAFGIKASVPFFKLMNMRQVTIAAVNGFALGGGCEIAMACDIRIASDNAVFGQPECGLGIIPGFGGTQRLARLVGMGRAKEMIFTCDNIDANEAYRIGLVNKVVAKEELMATAKAMAAKIISKGSYAVSVAKAAINNGYDMDIKNAVEMEANLFGVVNDTHDKKEGMGAFLEKRAANLTDFMSTKRSYLSKVVVEMPDSGIKDFFDIANTMDGALSLGVGEPDFQTPEHVREAAVASIRRAETKYTDNRGTVELRAAAAEYLEKFDLHYDRADEILITMGASEGIDLALRALVDPGDEVLVVEPAYVSYIPCVELCGGIPVSIPLQAKNRFRLTAEELEEKITERTKVLLISFPNNPTGAIMEKADLEAIREVVLAHDLFVITDEIYAELTYGKKHVSIAALPDMYERCVVLNGFSKAFAMTGWRMGIAAGPAEVIFHMNKIHQFTTMSAGTTSQYAALEALTSPVRDEEIDVMRQEYDERRHLMVDGFRAMGLKVVEPEGAFYVFPSIKETGLTSMEFCRRLLQEQKVAVIPGDAFGSCGEGYIRCSYAYSKDVIKECLEKIAVFVAQFDLNKNAQQMLDNYHLNQLAEPLLVWFLDHARVLPWRERPESYRVWVSEIMLQQTRVEAVKPYYERFLKALPDVAALAACPEDQLMKLWEGLGYYNRVRNMQKAAVTVTEEYGGVLPADYGKLLELKGIGSYTAGAIASIAYGIPVPAVDGNVLRILTRVAADDTDIMKQSFRSAVEAQLGEMMRELTVPEELRRALRDENVPGALNQAMMELGATVCVPNGAPLCEECPWSKMCLARAQGRVMDFPVKSKAKARRIEERTVLVIRDGEKVAIRKRPKKGLLAGLYELPNLSGALSAEEVLSYVKEQQFAPLRIEKLADAKHIFSHIEWRMSGYAILVEEAGFAAEKEPESGNGRTPEEKADGEGGLIFVDAWDARERYAIPSAFSAYAGYLKKEFDMYDCIVIGAGIAGAVAARKLAEEKGKRVLVMERRPHIGGNCYDEKDAHGILIHNYGPHIFHTGLEEVFAYLSRFTDWYLFGHEVVAKVGDQLIPVPFNLNTLHMVYGKEKADRLEQKLIETYGEGSRVPIMKLRENEDADIREIAQYVYENVFLYYTMKQWGQKPEEISPEVTGRVPVLISYDNRYFQDKYQGVPANGFTEMFEKMLSHPGITVGCGTDCLSRMRFADNEIYFDGEKFDGDVIYTGALDELFACRYGRLPYRSLDFRFEHYDGASYQGHSVVNYTVSEDFTRITEFKFLTGQKDTDGTTIVKEYPFAYTGAEGEIPYYAILNEENQALYEKYRALTAGMEHFHLLGRLAEYRYYNIDAMVKRAMELADRLMKLLTFAIPCYNSEAYMEKCIESLLPGGDDVEILIVDDGSHDRTAEIADAYEKKYPGIIRAIHQENGGHGEAVNTGIRNATGLYFKVVDSDDWVDLDAYRKILDKLREISGGDRVLDMFIANYVYEKEGVKHKKVMRCSNLPKDRIFTWKEAGHFHKGQYILMHSVIYRTKLLVECGLELPKHTFYVDNIYVYKPLPSVRTLYYMDVDFYRYFIGRDDQSVNERVMISRIDQQIRVNKIMVDAFDLWKIPNRKLRHYMFNYLEIITVISTIMLIRSGTEENLEKKRELWKYIKEKDIRLFHHLRAGILGNTMNLPGKGGRKISVAAYKLSQKVVGFNMRTHPAECSKLGKTRIIKDAGRGVVRNTGFCGQNAAAGYIWNFKIMYFLKTISRIQCRDSRMSKRGKDTEFDVGRGMEETLEFCFKEFVAAGYILELYAHALTEIYSSRYRAGIACYMSTLNLTLLTDLYELTMMQGYFKNHNQDVVVFDAFYRSNPCDGGYSVCAGLAQVIDYIENLHFDADDINYLRSLKIFDEDFLEYLSNFKFSGDIYAVPEGSLIFPREPLVKVVAPIMEAQLIETAILNIVNHQCLIATKAARVCYAAKGDNVMEFGLRRAQGPDSGTYGARAAVIGGCNGTSNVLAGQMFHVPVLGTHAHSWIMSFPDEYTAFRKYAELYPSACILLVDTYDTLKSGIPNAIRVFTEMRDAGIPLTYYGIRMDSGDLAYLSKQVRKMLDEAGFPDAVISASNDLDEYLIESLKLQGAAISSWGVGTNLITSKDNPAFGGVYKLAAIRTADGSFQPKIKLSENVEKVTNPGNKTFYRVYDKKTGKIKADLICLYDETFDESEDLKLFDPNAPWKKTRLPGGSYTLREMLIPVIKAGKTIYTSPGVMEIREICNHEKDTIWDETKRFVNPQEIYVDLSQKLYDMKTALLNEMSMDSMRRERAMALFEEGYNCAQSVFLAFSDLHGMDTHTAAVLSSSFGGGMGRLREVCGAVSGMFLTAGILYGYDDPGAREEKAAHYARIQELAKAFEEKNGSIVCRELLGLSVKREEPTPKERTAEYYKKRPCKELVGDAAEILEKYIAEHPVDERLEKRGTVRMMIRRAAIQDLEQIMQIYARAVQYMQASGNPNQWVAGYPSRTLIEEDIARGVSYVVDRDSVIEAVFSYIEGEDPTYRQIEQGMWRTNGSYGTVHRLASAGRLRGVAGICFSWCAEQAKLHGCSSLRADTHQDNRIMQHLLQKNGFVYCGVIHLANGAPRLAFERVAVALEGAYAGMQNPNRMNPGGAYEGTPNANGMNPGMPQQKQKGDGRGYGIASLILGIVSVLLFCTCINWVTGILAIIFGIIQITKNKEQGLAIGGIITAAISMVLSVVLYLAMWFGMTNAGITYEDLLYDQYDDSYDSDGSDPWYDGDGNGSYDGGGNDGWYDGGGNDGWYDGDGNDGWYDGDGSGGYDYYNDPYDYFRDYYDVQEPGGNQFMMAAGCCAAFYMQVSLRVPTEAREAMAMDELAKKVAITFDDGPNPDYTEMLLAGLKERGVSATFFLLGKEVEQYPEIVKKIHEGGHLIGTHAYEHVNLSNLTDAAAIEQVDKTNAAIHEIIGVFPEYIRPPFGCWKPNLDYETTMIEVLWDVDPKDWATSNSSVIAQRVLGDVEENDIILLHDASESSVLAAFKIIDELKAQGYTFVTVEDILLEMDLFEYMREQQKETEAPLASRLRPTTLDEMVGQQHIIGKDKLLYRAIKADKLSSIILYGPPGTGKTTLAKVIAHTTSAEFLQINATSAGKKDMEEVIAQAKNNQGMYGRKTILFIDEIHRFNKGQQDYLLPFVEDGTIILIGATTENPYFEVNGALLSRSIIFELKSLSKEDIRTLILRAVNDREKGLGAYDAVIDDDALEFLADVANGDARAALTAIELGVLTTERSADGKIHITLAVASECIQKRVVKYDKSGDNHYDTISAFIKSMRGSDPDAAVYYLARMLYAGEDIRFIARRIMICAAEDVSNADPMALVVATSAAQAVERIGMPEAQIILAQAVTYVASAPKSNSAVCAISDAMAAVRDTMTAPIPVHLQDAHYKSSQKLGHGIGYKYAHDYPNHYVKQQYLPDGLTDRTFYHPSENGYEKTIREYFNKIKGMQPMQSYQEMSKEELLKEKEHLEAEYKKFQQRGLKLDMSRGKPSQEQLDLSMGMMDVLSSYSDLACEDGTDCRNYGVLDGIQEAKVLIGDMIECNPENIIIYGNSSLNIMYDTISRSMTHGVMGNTPWCKLDKVKFLCPVPGYDRHFAITEYFGIEMINVPMLPTGPDMDMVEELVSKDEAIKGIWCVPKYSNPQGITYSDETVRRFARLKPAAKDFRIYWDNAYCVHHLYDMDQDHLIEILAECKRAGNPDMVYKFCSTSKISFPGSGLAAIATSANNLEDIKKQLKIQTIGHDKVNQLRHVRFFKDVHGITEHMRKHAASLRPKFEMILDTFDKELKDLGVGSWYSPKGGYFITYETLEGCAKSVVDKAKKAGVVMTPAGAPFPYGKDPKDSVIRISPSYPSLEDLTTATQIFVVCVKLASIEKILGEQQAMKKIIGIVTPILLLILPYLLFVVLSVGMGRPDRDSSGAYIMAGDSRLQMTQTTICIVYTVVVLLNVVWVIYQTAAGTSAQALLLWDMLMKLCYIPYYLLAAFMVLAGFATFMFGGAAIIGVMWIADVLFLIPPSIYGLCGCIRACSEKKLSVGAAVALSILHFIFVLDVVAAVVGFCTVYGRHKRQKQMEAARQQQMPYRDMAINSITNSVAAQQASTYTATKTDYTEKKSESSTKTDTGVVYEKSSDQTSGTVTKKTDYALVNKLKADAEERTSQLRSLVEKMMTKQGVAIGTADSMWSFLAKGDFTVDEATRAQAQADIADDGYWGVDQTSDRILDFAKALSGNDPEKADLLLDAFKKGFKEATKSWGQDLPDISQRTYDAVVEKFNKWKNGTEETEAAQTQAMKEISVKALAKVNLGLDVVRKREDGYHEVRMIMQTIHLFDRLEIMRNQSGRITMSTNLAFLPTNENNLVYKAAALLKEEFDIGDGIDVKLHKHIPVAAGMAGGSTDAAAVLYGMNRIFDLGLSKEDLMTRGVKLGADVPYCIMRGTALAEGIGEKLSALPPMVKCPVLIAKPQIGVSTKFVYENLKLDADTVHPDIDGLIGAIRAKNLEQIAGHMGNVLETVTIPNYPVIAEIKEHMMEHGAVHAMMSGSGPTVFGLFANGDTAVAAYEAMRESNLAKQVYLTSIYNNARMTEDLTLNMNAYLPLRDVVFNTLREAILKGELKPGERLMELQLAAKLGVSRTPIREAIRMLEQEGLAVTIPRKGAEVARMTEKDMEDVLQIRDALDELAASIACEQISEEELAELRHTMHEFEESTKTGDVKRIAEADVRFHDIIYHATRNVKLENMLNNLREQMYRYRVEYLKDEKNFPILIREHSQIVEGLTAKDKTMLTAAMHKHVMNQATAVKEMIREQEKMAEKTKISERLDENIAHMEELFHTCDDIKKKRMNLGKNRDVACYLTFIEVSVDMGNSALLEVLKYLRGLEREEILRVLEQNALGISDATYFTTIEEAGDGLLTGEAIFFVDGFAKAVKIPDDGYPNMGVNEADSEKVVRGSNEGFGDSVKQNAALIRKRIRSPQVKVKEKKTGVRSNTNVYLVYMEGIVYPELVAKIEEQLNGFEIDGVLDSGVIEQLSEEKWYSPFPQFQTTERPDRAAMSILDGRVVVLSDNSPIALILPTDYNSFIKTSDDYYNRWEIASFERLLRYLASFFAMTLPGLYLAVTNFHTQILPTTLLLSFADARSGVPFPAVIEVIIMELSFELLREAGVRLPGAMGNTIGIVGGLIIGQAAVEANLVSPIVVIVISFTALCSFAVPNEEFATAFRLLKFFFIGICAWLGFFGFLAGLLAVLIHLSHLKSFGVPYLMPFVAADLNDYEDERDFLWRQPLRLLWKRPIYAKKNNRRKLRMKQMFSENNRISGRQMYRLMTYDLLGIGTLLVPQMLAKAAGRDGILSIGIGMAAALMYLWILRRIAPPAQESYPEYMKRQLGRIGGGIVQAGYLIYLVLLAGYVAYLFADIILRDLLRGESFYLVLSVIMLLVLYGLVGGIEGRARAYEMLFWFLLIPLFLMLFAAADEVCTDYWVPLGMSSLKGVAGGAYGVFLNLSFAFLLLFSGTYVRRQETLFTAGKRAILFVGCLHAVLYLVLEGIFGVPALAGMDYPAVTLMSTVKISGGFLKRTDAFMFGVWFFTLYALLNSCVFYGSSIAEELCKPIRKMPKEKKYMWIFYGSVAVAASAAAICFYRSREVFDWYERFLWYVGTPFLVLAPVFTAQKKWGRRMLALAVICAAALLVMTGCAPAELEDRDFPIDIAVRDMKDAGLTWYEAEQEGNRMVDYSHLKVLILEQEFVEDEAAVQEWLTFLKEKSEVPRNAYVVVTEDAEALLAQSETLGEAVGDYLEEQFENVSQIKKQAYPTIGSLYQEMDNRQETLFLPYVTVEEEKPVVEQYYVWKRGTPAGMVAGEAARLAFFTQNRMMEYVLPLEEGMLLLSDASNEIAFTKKDGVRKVVVTIHCSGSVQGTGGKENEGKLALSAEDYMNRMAANVRQEKQVDLTGSYRKLGGAARGWYEEYQERGENYEEEVEVVYRVKINWIHLSMQRRKWIWYLLLGMNVTLLALLGMQYGKNQRIQGQIAGKVLRFHVLANSDTVEDQNLKLAVRDAVGSQMAELLSDVQDRAACEQVVEAHLPEITETAQAVVREAGYGYEVHAAIEETDFPSKTYGKFTFPAGKYEALRVVIGEGAGHNWWCVMYPNMCFEGSMYEVVDESAGEELKKVLSKEEYRAVLEEENYEVRCRYLTFLDGLKEMTKDVLISISGLQFAGGENSEPVEVITSGSYYKKNGRHYILYDEVAEDTAGTTKNIIKLGDEVLDITKRGETNVHMMFEKDKKNVTYYYTPYGNLLIGIDATKVQVEETEHNLSVKVDYALEVNYEHMADCKITMNIQSKNAGDFKIMSTVTIVLLVILAVLIVGLIVLYFLGKKAQKKRDEQEAQLAANSQTVSMLIIDKKRLRLKDSGLPQVVIDQTPKMMRRSKLPIVKAKVGPKVMSLIADEAVYDLIPLKKEVKATVSGIYITKVTGVRGPLEKPQGKKSFRARMQEKAKKANAELEKEKAELAKEKAAKKKKMKKRTVALMLCAMMAFGAAGCGAKDADPAATEATESAASTEGLADSAVSGTITSTPCASSAFDLKGSDYVTLCDYSAIPVTITGDYDVDDQKVKDYFKQMFDNYGPFYTADPDKTTVEEGDIVNVDYVGKLDGTAFSGGTAENQNIDVYQNASATGTGYIDGFTDGLKGASVGDVIDCDVTFPDDYGNTDLAGKAVVFTFTVNSIQKEMTIDDVDDAFAKEQFQVDTVDEMYGQIRSYMESSAEYNKQKDTTTAVQNYLIDNCEAEVPEDYLAARVDDYRRQYIEQNCNGDESQLADYVSTYYGKTVEEMEAYWNEGMEKSIRLEFIMDAIADELGVEVNQDDIDAYAEQLVSQNGYESVEAMYNIYGFGDTDYGKRYFAALYRYDQALDQLLETAVVTVDPSADTESDAVTEDAADEAEAGSATDASTTYEAAESTEETGAANMDLVNIRDLFRSKDEYLDTTVTIGGWVRSLRNSKNFGFIVVNDGTFFEPVQVVFSNVLENFEEVEKLNVGAAIIVTGKLVATPEMKQPFEIQAEKIEVEGASTPDYPLQKKKHSFEYLRTISHLRPRTNTFEAVFRVRSLIAYAIHKFFQERDFVYVHTPLITGSDCEGAGEMFQVTTLDLANVPKNPDGTVDYTKDFFNKPTNLTVSGQLNGETYAMAFKNIYTFGPTFRAENSNTTRHAAEFWMIEPEIAFADLEDDMILAESMLKYIIRYVLENAPEEMAFFNNFIDKGLLDRLNNVVNSDFARVTYTEAIEILEKHNDKFEYKVSWGADLQTEHERYLTEEIYKRPVFVTDYPKEIKAFYMKMNEDGKTVAAVDCLVPGIGEIIGGSQREDDYDKLLARINELGLREEDYEFYLDLRKYGSARHAGFGLGFERCVMYLTGMSNIRDVIPFPRTVNNCELMRYILENDTLRVEIESFGAEIKSVKRKADGREYMWCGDPKYWGRTSPVLFPFVGAPKNKEYRYEGRTYPMGQHGFARDMEFALEAQEGKSIWFVLSSTEETYAKYPFRFRLHIGYTLDENEVSVHWKVDNTDEKPMYFSIGAHPAFLCPINGEQDKTGYRLRFGDLTDKLHHHGNTPDGMAVMVDEELELEDGEAVITPGFFDKCTYMVEGAQTGEVSILDRDGEAYVTVRFDAPLFALWSPEGKEAPFLCIEPWYGRCDAVDFEGSLAERPYENALAAGGSFDAEYAIVFAMKLGYKIKPRDAKSNPTTAILAAVFVMFLISGLLLLLLALLLYKMEPGESVIKIGIVAVYVISGLCGGFLMGKRMREQKFLWGLAAGIIYFLLLFGVSLLVKGTGDLQMTRIFSTLILCGASGMAGGMLSMKHVKTLNTRKLQNTIKKGGCGECQTSCQSACKTSCTVGNQSCENRMVHQYKNNGYDIVLDVNSGAIHVVDDVTYDVIALYEGHTREEIVNSLRERYPETEVEEALDEVQMLVDNEELFTKDTYENYIMDFKKRPTVVKALCLHIAHDCNLACQYCFAEEGEYHGRRALMSFEVGKKALDFLIANSGNRRNLEVDFFGGEPLMNWQVVKDLVAYGREQEKLHDKKFRFTLTTNGVLLNDEVMEFCNREMGNVVLSIDGRKEVHDKMRPFRKGAGSYDLIVPKFQQFAESRHQDKYYVRGTFTHYNLDFSEDVLHLADLGFKQISVEPVVAEPKEPYAIREEDLPKLFEEYDKLAVEMIRRHKSGEDFNFFHFMIDLEGGPCVAKRLSGCGSGTEYLAVTPWGDFYPCHQFVGNEKFLLGNVDEGILNTDIRDEFKCCNVYAKEKCRKCFARFYCSGGCAANAYNFSGDICGAYDIGCELQKKRIECAIMIKAAEEEQKNEEEMKKSKAIVILIVILGALAGLAYYASIILSSTGIGEEMSIPLGLDLSGGVSITYQVVDDNPSAEDMSDTIYKLQKRVEGYSTEASVYQVGDDRITVEIPGVSDANAILEDLGNPGSLEFQLPDGTVYMTGDQVADAQAGTTTDSYGNKQYVVQLKLTDDGAKLFADATTDNVGNYLPIVYDGETISYPQVKEAITGGTAQISGMKTYEDAETLATQIRIGSLSLKLQELESSVVGAQLGSQAISSSLKAAAIGLVIVMIFMIVMYQIPGLAAAIALAIYTCLVIATLYLFEITLTLPGIAGIILSIGMAVDANVIIFARIREEIATGKTVNSSMKIGFKKAMSAILDGNITTIIAALVLIALGSGTVKGFAYTLMIGIVLSMFTALVVTRWILYSFYAIGIRDEKFYGRAKERRTLNFLGKRGVFFTVSLAMIAAGFIGMGVHAAKGSGALNYGLDFVGGTSTTADYGKDYTIEEIENTIVPVVADVIGDNDIMANKVEGTTQITVKTRTLTLDERDTLEQALVDQLGADESSITSQSISSTVSSEMRSDAIVAVIVSSICMLIYIWFRFKDIRFGASAIIALLHDVLVVLAVYSLLRISVGNTFIACMLTIIGYSVNDTIVIFDRIRENLGRTAAKQTPELLAEVANKSLTQTLSRSINTSLTTFIMVFMLFLLGVASIREFALPLMAGLLCGAYSSICIATELWYIMRLHLGKNRLIKKMYNGMTQRLTLPYLPSGSTVKKGSVDGIEGAVDLDVQFVEMDGMKLFAIYLVVMNVLGVAVMWSDKRRARLHRWRIPEKVLFGVSLLGGSAGTWAGMYLFRHKTKHWYFVVGMPLILVCQAALAIYLVHLYVLMYTMEDIEAVDMEIAQAIKDEFDRQNSHIELIASENWVSPAVMSAMGSVLTNKYAEGYPGKRYYGGCDCVDVVEELARERAKKLFGCDYVNVQPHSGAQANMAVQFAVLKPGDTVMGMNLDHGGHLTHGSPVNFSGTYFHIVPYGVNDEGFIDYDKVMEIALECKPKMIIAGASAYARTIDFKKFREIADACGAVLMVDMAHIAGLVAAGLHPSPIPYADVVTTTTHKTLRGPRGGMILCNQEAADKYNFNKAIFPGIQGGPLMHVIAAKAVCFKEALQPEFKVYQQNIIDNAQALCKGLMNRGIKIVSGGTDNHLMLVDLTNFDQTGKAVEKLLDSVNITCNKNTIPNDPKSPFVTSGVRLGTPAVTSRGFNTGDMDQIAEAIAMMIKKGEPAADRARAIVAELTAKYPLKMGKKSVGILIGVAAVAAVLGGTGYYFRDDIRQMIPIFDDGSSEDKVYVEKVSRIMNQYAGVSNRYNGVVETQDSYEVNVDSSRTISEIKVEVGDEVEEGQTLVTYDTSDLTMKIEQAKLELEGIQNEIDNYNKQIDTLTKEMEKVDESERYDYTTQIQNIQNSIAQKQFDMESKKLEISKEQKQVSSSSVVSKVAGVVKEINEKGVDSNGNSAPFMTILQTGEYRIKGSIDEQNVWMLSEGQEVVIRSRVDSTKTWSGTIGKIDTESPQQGNDNGYYSTSSAGDTQSASKYPFYVDLDSVDGLILGQHVYIELDQGQEEVKEGLWLYGSYIVQDEDTPYVWAANEKNRLEKHYIELGEYDADMDEYEIVSGLAEDDYIAWPMAGLYEGVTTVTDEAEVDYSSPLYNQPADENLYDTEGVYDTELLYDVLDSVYDTELPDEMYDGMDAGEGTEAEVAEMILNLQNIYKDYQQEKLVVPVLKDVSLTVEEGEYVAIMGPSGSGKTTLMNIIGCLDRPTSGTYELAGENVLKLKDRELSDLRLKSIGFVFQSFQLMPRESAVENVALPLSYAGVRKKERRIRATKALERVGLGDRVNFRPTQLSGGQKQRVAIARAMVNHPKILLADEPTGALDSKSGEQIMELFDSLNEEGVTIVMITHDPRIAAKAKRIVRIIDGEIYEGEGDGAVSMKIKKVIAVIAGIAVTLSAAVGGVYGYKSYQDKKLIAEVQPVSSLNWGYWGDTETSYGTVTNDSSQEIYLDDSRMIKEIYVEKGDEVQKGDPLLAYDTAELQIEIERKKLDISTIENNIERQKYKYEMLKTQTPVKKDPPKLNEEQLAWYQHMDEENRLTETDKNDSRIYNYLTAASIPYNVTTNAAGELVYPAGTAEEPYIYYVNQNAYAYGGFFNAIRPTAEGGSGKHVRVIVCKKDADGKMVLDTDEATGRQTPVADDTVSPNTVELNGSDFPADYDESRMWYLFSGKEYIPTSLADEYMQAYEDFMADWEVPKGYTSEELYQEAAEIEEKLKTLDIQRRQEQLALESMEKSATDGVVYAEVDGVVKTLGDPDEKPEQGQAFLVITGDDGLYVKGTISELLLDDVKMGTVVTANSWESGMTFDATITEISDYPVSGNSWGDGNPNVSYYEYTAYIEDSSALRNGEAVDLSISTNQSDGGGIFIEKAYVRSEDGKAYCMIADENNRLKKQYVVTGRTVYGSAVEIKSGLTEDDRIAFPYGKNAVEGAAVTDESSNYMFENIRLSFRGIWAHKMRSFLTMLGIIIGIAAIIAIVSTIKGTNEQIKQNLVGAGENTVEISLYQGEWEYEMEYNGIPEGVPLVADEVVEQLKEIPHVENVSRYLSRQDYNGVYHLNTGLSGGYVKGVDAAYFDTCNYIMKEGRGFTQQDFDQYHKVAILDEDSADALFQGEEAVGETIEIQQEPYVVVGIVTKAKKFEPVINSIDDYYTYAQDSAGSVYVPATTWPIIYQYDEPQNVVLRVESTDDMTSAGKAGADLLNGYLSVSDTTIQYKAKDLMEQAQQIQELSSSTNTMLIWIAGISLIVGGIGVMNIMLVSVTERTQEIGLKKAIGARKSRILGQFLTEAAVLTSLGGLIGVLVGIILAQVISYVTTTPVAISVPAAVGAVAFSMVIGIVFGVFPSYKAANLNPIDALRHEMIKRIVMMEGGVETLSYFSHQMAGEFQKLGYAVFFYDLKQEESSAGKLRKFIRPRETVLVTFNFQGLEKEAGVYREGIGYLWDTYHIPCYNIAADHPYFYDDRLKDLPEKYRHISIDRRQKAYFEEFYPEYVSRGFLPLAGTGLREGEDEAKTGKAGAQGTAVETEEAGAQGTAVETEEAGAQGDAEQAAPCYDVILTGNYTKLSFFEPYINWINEEYAAFYRGIIDDLLEHPACTVEEVALAHCEREMGKEPNDQLRIALHKMIFIDLYVRNYWRGKAVRTLVNAGIPVHVVGKGWEELEDVRHPECLKLHPQTDSVTCLEMLVDAKVSLNVMPWFKDGAHDRVFNSILNGAVCVTDPSCYLEEELHEGEGVCYVALQDMDALPEKVKDLLQNDSGRNEIVRRGRAIVEQKHTWAQRAKTLAAWIAEDAAQMIDLKFLRENPEVVKQNIKNKFQDHKLPLVDEVIELDAEARKTQQEADDLRAKRNQLSKEIGKLMGQGKKDEAEAVKTQVAEGAARLAELEEKEKELQEKVTKIMMTIPNIIDPSVPIGKDDSCNVEIEKFGEPVVPDFEIPYHTEIMERFNGIDLDAAGKVAGNGFYYLMGDIARVHSAVLSYARDFMIDRGFTYVVPPFMIRSNVVTGVMSFDEMDAMMYKIEGEDLYLIGTSEHSMIGKFIDTINDEEKLPYTLTSYSPCFRKEKGAHGIEERGVYRIHQFEKQEMIVVCKPEESKMWYDKLWQNTVDLFRSLDIPVRTLECCSGDLADLKVKSCDVEAWSPRQKKYFEVGSCSNLGDAQARRLKIRVKGKDGSKYFAHTLNNTVVAPPRMLIAFLENNLNADGSVNVPVALRPYVGGKEKLIPVKMSNPIVTIEMENGDIMKAELYPEIAPNTVNNFISLIQKGYYDGLIFHRVINGFMIQGGCPDGTGMGGPGYDIKGEFSQNGFKNDLKHTEGVLSMARAMHPDSAGSQFFIMHKTSPHLDGAYAAFGKITEGMDVVNKIAETATDYSDRPLAPQVMKKVTVETFGVEYPEPEKCMNMKNIIKNKQKELMQGMIALILCVALFCSAAVSGENDGSEWKMRHGGQKYEETGTDGRGQTPLYAGILAEFRANEMAILSDNQEILAKAAERAAEEAAHPEQGVYTFLQGPKSWTEGRAWSGEWSNQYVRGNYFGNFGCGLCCMANIYCTLTEYTCSPWDMYEYARQVSGYAPSRKIGAIGWADMKVTLRKSGFDCTLNTKPESYEQFQQEITASQMAVVLVSSRDDDTYWKKTGGHYVSISLYDASSDQVFLGDPADPDGNRSWIPLRYVYDALKTVSQYQYLLVQDYAEEQNQWMHDGITDAWGGMMKENVAYLLGIVAGVAAVGIICWVKKRGRRETDYDERQYQTRDRACRYGFLTLLFYELLYGALYSKEAPSWCDYTMGNYLGIALALLVFGVYCIWNDAYMNLNQKPWSVHLLFGVLALCNFGIAENNQRIGVLFADGKLGFGAVNLVFAVMFVVFEIVFLIKRSREKRDLSEEKAEMKNLRLKAARAAKDLSQQALAEKVGVSRQTINAIEKGDYNPTIRLCIAICRELDKTLDEIFWEEEECMLKLEYILIGKLPKTERDMLLENLRTERECGRNVLEWDSAKKHIQEEKRVEGALAKERLAEKVFAEKAILVSGDAKELNEAQRIGMAALCYLVPGDGRTQRNEAAAGEMEVTSPADMYAEGMEEIDGSFLQHVYERHHRIPWIILKTPRCIVKEFSMEYLDALFELYAGKGMTDYMEPLYPYEEEREYQQAYIEQMYRFYGYGMWIVCDRNTGELIGRAGVEHREELGGELELGYAIGVPWQRQGYATEVCNAILTYIKDELMLPSVSCLIETGNVVSEHLAQKLGFHYCETVQIDGKQMRKYKVAFYMRHMADYSQKEKELEREHLEKLVKEEDRSIKPMKEFESPEDLYHELIASVRKYHPSADISLIEKAYHVARDAHEGQTRKSGEPYIVHPLCVAIILAELELDKETIAAGLLHDVLEDTVMTADEIKEEFSEEVLLLVDGVTKLRHLHLADNSHNHDQKDRSAERLEMQAENLRKMFLAMAKDIRVILIKLADRLHNMRTLKYQSKEAQIRIARETQEIYCPIAQRLGISKIKIELDDLSLKYLEPEAYYDLVRQIDQRKSVRDDYVQSLVEEVRAHIKAAGIVAEIEGRAKHFFSIYKKMVNQDKTLDQIYDLFAIRIIVDSVKDCYAALGVIHEMYKPIPGRFKDYIAMPKPNMYQSLHTTLIGPTGQPFEIQIRTYEMHRTAEYGIAAHWKYKEASNNGGAAVPMTVTEEEKLSWLRQILEWQRDMSDNKEFMSLLKSDLDLFSDTVFCFTPTGDVKNLPNGSTPIDFAYSIHSAVGNKMIGAKANGKLVPIDYVIQNGDRIEIITSQNSKGPSRDWLNIVKSTQAKNKINQWFRSELKEENITRGKELLVASCKAKGINFADINKPEYQEKVLRKYGFHDWNSCLATIGHGGLKEGQIVNKMYEEYKRDHLARITDEEVLETIGSENKNPESAKRSKSGIIVKGLYDVAVHFSKCCSPVPGDEIVGFVTRGRGVSIHRTDCINIINLSDMEKERLIDAEWQHDGQDGSNGLYRAEIKIFGNNRTGLLVDITRVFTEREIDIDAIHSKTSKQGVATIDVSFSTKGREELGSVIDKLRQIDSVIDIVRTTGMAPLKVEQYVVGPVQTNCYFAVNDETKEMILIDPGANADRLIQIIEEEKLNPVAILLTHGHFDHAGGAAEVAAHFGIKVYAEEHERETLDDPKLNLSGWTGAETTYHADVFLKDEQEFDLAGFHIRVLFTPGHTVGGCCYYFAYQDALFSGDTLFAQSVGRTDFPKGSASALIRGIKEKLLPLPDEVTVYTGHNDTTTIGTERRYNPYLMIRETRGFPDFCRSKDAYDIMNPIGFILEVPAELRMRRKQRKKMIMIEVTLNQPEFEYDIHSLIKAFYPSEYVGVSAEKKEYDEPVTSRMHVEYTDDAITLRWQQGEMAPAVERTFAVDPLDRPETKNRLKQNLYALLSDATGQYLPWGTLTGIRPTKIPMKLLEEGKSRDEIYTYMKQTYFASDEKICLATDIAERELSLLSKIDYDNGYSLYIGIPFCPTTCLYCSFTSYPIASWAKRVDSYLDALEREIEFAAVKFAGRHLNSIYIGGGTPTTLEPYQLDRLIRKIKCSFDLSDCLEFTVEAGRPDSITYEKLKVLRQHGISRISINPQTMKQETLKLIGRHHTVEQTVESFHMARELGFDNINMDLIMGLPEETLDDVRRTMEQVAELAPDNLTVHSLALKRAARLNMFKEDYKDYKIINTQEHMDLVADCAAQMGLFPYYLYRQKGMAGNLENVGYAKEGMAGVYNVLIMEEKQTIVACGAGASTKRVWTEPNPDGTHRIERAENVKDVAQYIARIDEMIQRKQKLFAEEMKYGEISQKSNENFVAGYTFNLCENYISIVILKQNITNQMNKEMTVNGKSYTIIKLLGKGKGGYSYLAESGNNRYVLKQIHHEPCDYYQFGNKLEAEIRDYKKLKEIGIKMPAMLEADVKNERILKEFIDGDTIYQLVLEDKMKTDYIEQLHRMCALLYAANTNIDYFPTNFVVNNEEIYYVDFECNDYMEEWNFENWGVKYWSKTPEFLQYVKEHSMKTKRNIIALFTLCTALSITGCAGQETSKTENTQNTAAVSASESSADDSNAALDDLYQQENQIFADHKDVWDKVFGMMNKSTADPDGNYADYLADTVEANKASFTDSELKTLTDDIKTIRKIEEQITEIESQNAVSDTSDSKSDSGDTAPFQNFSGKDFDGNAVDQNLFSGNAVTVINFWFTGCKPCVAELSKLNELNDAIKSMGGEVIGINTETFDDNEAAIEEATKILESQGAAYRNLSIDSDSAAGKYAADIMAFPTTILVDRNGNIIGEPMLGGIDNQDNYDALMKQIQSVIDADSANKMDKKTTIRSKKTARIRGWIQAAATLLTNIHIPNLFKGKIYQGNAKTVCVPGLNCYSCPAAAGACPIGAFQAVVGSSNFKFSYYITGFFILLGVTLGRFICGFLCPFGWFQDLLHKIPGKKFSTARLKPLRYLKYIILIVFVIALPMLVTNSIGMGDPFFCKYICPQGVLEGAIPLSLGNSAIRSALGRLFSFKCLILITVIVLSILFYRPFCKWLCPLGAIYSLFNKISFLNIKVENSKCVGCGLCTGACKMDVDVRKTPNHPECIRCGACMKACPKDAIHYQFMEKSCSGNFNNQQMRKKISQFTLFIAGTLMIGYGAIRGEAATVLGKAIKLCLECVGIGMLLSFTVIVFVDQLTLVLYNSGCKILVKKRENILRLLIVEDEKELCDTIAKSLYDAGYEVDTSYNGSEALEYVLTEEYDLIVLDLNLPGIDGMDILRELRRENEETKVLILSARSQIADKVEGLDAGANDYMEKPFHLQELEARIRSLTRRKFVQRDVCLNNGDIRFDTKKREAYAKEERVPLTRKESGILEYLLLNQGRPVSQEELIEHVWDASVDSFSGAIRVHMSSLRKKLKAVLGYDPIVNKVGEGYKMREESEQMKKMSLQWRLTIITTLFIAVICGCLTLFVYKNGVYYIDLLQDTVDAQSDEDNSEEADEIYINIPDDKWDDFADDFSIQVYNNKADYKKRSLLFSTLLALLGGVATYFLSGHVLKPLRNFSDKIEKVQAQNLADSRIEENEVKELNRLSVSYNKMLERLSEAFEVQRQFTANAAHEFRTPLSLMQVQLDLYNSMEHPGNDECAEKTIAMMTEQNERLSRMVKILLDMSELQIVVRDEKIMVDALVEEVLTDLEPLAMEKNIRLIGKCKDVTMVGSDILIYRLVYNLVENAIKYNRPGGQVVVTAEWKEKHVFLSVEDTGSGIPEELRKRVFEPFFRVDKSRSRELGGVGLGLALVYEIVRVHDGNIVIRDNPSGGTVFEVIFMALSKKPVNGMKDILPEEMQIRDYVQQVIKETYRSFGFTPIETPCMENIANLSNKQGGENEKLIFKVMKRGEKLKIAEAKEEADLVDFGMRYDLTVPLVRFYANNANDLPSPFKALQMGSVWRADRPQRGRYRQFMQCDIDIIGEPSNLAEIELILATTTTIGRLGFKNFEIRINERRILKAMAAYSGFPEEEFDTVFIILDKMDKIGLDGVAEELAKEGYTKESIDKYLALFEGVSKAQNGIKYLADTLQGFLEPEVEQNLQEIIDSVETAKTADFKMVFDPTLVRGMSYYTGTIFEIAMPELGAACGGGGRYDKMVGKFTGNDVPACGFSIGFERIILLLMESGFTVPMQRPKVAYLIEKGCTSEQVSKVIARAQEERVAGKQVLVVRMNKNKKFQKEKLTAEGYKDIVEFYKDMGRIIGIDLGTTNSAAAVWENGESHLIPNAFGDYLTPSVVSIGKDGTVYVGKIAKERLVTHPEDTVSVFKRFMGTEKIYSLAGKKYRPEELSALVLKRLKEDAEHYLGEEITEAVISVPAYFNDLARNATKNAGELAGFHVERIINEPSAASLYYQCRSQMEDAVMLVFDFGGGTLDVSLVECFDNIVEILAVSGDNHLGGSDFDRLIADMFWKSCGLSENRFSAEDAAIVLERAENCKFELTGQETAQMCVTLAGREYRMEVSRKELILQAEPLFERMAQPIRRVLSDGQKSAREVDAVVLVGGSCKMPVVQKYLNYLLQRTDIAVVSPDYMIALGAGVYAGIKERNADIRDMLLTDICPFSLSVSQYNEADPNRDLCDVLIERNMALPVSRETIMTTAHDRQTKMRFKVYQGEAMYAEDNLLLGSITVPVPVGPEGKEKVRVRYTYDINGILVVDVHVVSTGQEKQLVIRNDKIKLSEKELKKRLEQLNKLKIHPRDLEENRLVLARAEKLHRETTGYIREQIDSRVQYFNYYLGRQDVLSINKGRKQLNLFLDYVEEQCLQEAAFEGTADGFSRWYESSKQAVDAQDQVDYRKEEQEYELWRGGHLTSMTIWQTLGILQTTDQKEIKKAYAARVKSCHREEKPEEWAVLHDAYQRAIQYAKRQEKESDLNGSRTVPSPVKPVAREGLKERDAALEKENGQPETDETEAQWQEYFARIRAGQERSRKMLTEELPERLRGLTLQGEGTQKKRWEEFMQSELAITLYKEPEFWRQIGEHVRAQEWSEEACRYIGKRVEDIKYEFNSRDYTELWRVLDELERICLEEALKDPLRRTKITLRGFGLTILVFVLIGVFVRIIMTQSRTHNCNELRLSNAGEKVTLVGWYENLRKVSKNLGFLILRDFYGTTQIVVETEEMMEKLDGVNKESTISVTGTVRERSNKNTELPTGEIEVVPEGIEILGKCIYNALPFEINQSREADENTRLKYRYLDLRNPSVKSKIVLRSRIVAELRNKMNELGFLEITTPILTCSSPEGARDYLVPARNHPGKFYALPQAPQQFKQILMASGFDRYFQIAPCFRDEDARADRSPGEFYQLDMEMAFASQEDVFSVVEEVLPPVFEKYGVYKTASKAPFVRIPYLESMDKYGTDKPDLRIDLVLQDATDVMADCGFGPFEGQTVKAVVVDGFTATRKVIDGICAEVEVQTANKAYWFKLDENGEFVGGISKFLQERKEKVIEALGLKPGDFIGLTAGKKLAAQKTAGVLRRLLGAASEKHMKKDCYEFCWIVDFPMYEIGEESGELEFCHNPFSMPQGGMNALCNEEPLSILAYQYDLVCNGVELSSGAVRNHDPEIMIKAFELVGLGEEDVKAKFPAMYNAFCYGAPPHAGIAPGVDRMIMLICGEESIREIIPFPMNKNAMDIMMGAPATVDQKQLDDVHIRIQMPEEKMGKRTGKNRKTGGRAGYGKRAAAAGMMFVMLFSFAACGKTTASEEAEALSGSCIDILNKVYETADLDESMRDAMQDYEMTTIDADMEEYVLGTDEITYTDSAYSAPMMTSVAYQCVVLRVPDGTDVPKAKQTLLDNANPAKWICVEAESVAVESIGDVILYVMGFDEDVSAIKDAFLALDEMKIIVDHTSMQPIYEQIVEQIKKQILQGTLREGAPLDSVRMLAKDLKVSALTVKKAYDALEEEQLIATVHGKGSFVLGVNPSLLAEEQKREIEQRMEQLVAKARAYGMSDEELRAVLELFLEAMNDGMVQLNKVTKAYGSFQLDCSMEVQPGMATGFVGANGAGKTTTFQILLGLVPPETGEIRIFGIPYTELTAKDRERIGVSLADSGFSQFLTVRDVTAILRNLYTRFDEARFLEKCQRYELPANKKIKDFSTGMQAKLKLLIAMSHDADLLILDEPTLGLDVMSREAMLEELQEYLDSEGTGGAPRSVLISSHISSDLEKFCDDIYMIDRGRIVLHGETDVLLDSYGILKVDERQYQALDRRYLLAGMREAYGYRLLTNERRYYQENYPDLVMEKGSIDDILILTARGEKLMKGLLTKDFRILAGQKRYFTIIILIALIFLCSGQPAQIIVGYCTMFGMLFTVNTISYDEFDHGYLFLFTLPVTRKDYVLEKYVFMMLCGGGFWAVSAAAGFVADYIRGDVVSLLEWLMPMFLILLEMIIFLAVMLPVSLKYGMEKSRTATMILGFAVLGAAIAARKLLPENFAGGLRWSAQLNPAAVTAVVFLVFLATLAVSFAGSVRIMQKKVFMEIEHIGDNKIRCALTEQEIESLGYDIDEIIANSEITQEFMHTVLELVEEQEHIQMEGISPMVKAELLQDHSMAITFGADKEVSLRDLVNTVSHMISQLDPDAASGKTAKAEEGNAQAAADTADTAAAAGTHKRTDPMICALRFSSFENMRRMSLLAFRGKIPKSSLYKMDGAYYLILDFTGFAKEEMRPFAFGTIEYDDAHYSDQGHIAHIREQGICIMKKQALEMLMQLMSREQIWELEENKRSLLRQAYRMKQECPHMSPVGLEYEMYAAIMKEVREITARLQLSAEAMKRQKMRTEQKSNVKNSVGRLVFVGLSLLLQVLWILLLFLRLNAYSTAISLCFSVGAFLVALSIYAKHENAAFKMPWIILILAFPVLGLCIYLVFGHKNVVAKAMRRRFETIEPVLFEQIPQDEAVLGRLEEQDFAVANQCRYIKRFGHYPVYRNTDVTFYPDAAEGLAAQLHDLASAEHFIFMEYHAIEEAEAFGRIKDVLAERAAHGVEVRLFYDDVGSIGFIDPGFIKRMEAIGVECRVFNPVLPILNIFMNNRDHRKITVVDGKIGYTGGYNLADEYFNITHPYGVWKDTGIRLAGDAVASLTVTFLQMWNATAEADHEFQTYFPKLDYRAADTGFVQPYADGPLTDGYFAEDVYLNLIKSAKHFFYAATPYLIISDDMTRELCLAAERGVDVRIVTPGIPDKKLVYQTTRSYYAPLVRRGVRIYEYTPGFIHQKQTLCDGETATVGTINFDYRSLYHHFENGVLLHGCGAIGAIGEDFAQIFEVSREVTEQYKGKRSMGLRIIQCILRLFAPLLMLREWKEPVRPGEEELKMRLVAAREKLAAQQLLIKEQKVPVLVLLEGWGTAGKGYCIGQIIENIDPRHFKVESMERKTGEEERKPFLYRHFTRIPEAGKFVFLDSGWMDEVVEERLHGELSEEKYAKRIESVRRFERQLTDNGYLVMKFFLHISKKEQTRRMERLTDEKDTVWRVGKKDLWQNSHYEKCMDAFSSYLKSTNMPSAPWYIVDAKSKKWTELQVLETLTQGIDIALDNRDMAVPLLQNVFPLERMPLLSEIPLDKTLDEETYRKELKHLKQRLGELHNRLYRKKVPVIIAYEGWDAAGKGGNIKRITSALDPRGYEVHPIASPEPHEKARHYLWRFWTRLPKTGHIAIFDRSWYGRVMVERLEGFCTENDWMRAYNEINEFEKELHDWGAVIIKFWVQIDKDTQLERFNERQNTPEKQWKITEEDWRNREKWDQYETAVNEMITKTSTTYAPWHILESVDKKYARIKALRIVIEELEKALDMQYGHFDNEKREYVIDCVDLPVSWTNYLGVKDLCVVVNHTAGGYMFYQSPEYHRVTRFRGNAVPMDRPGHYVYLRDAKDGDYWSISWQPVGKPLDQAKYTCRHGMSYTTYECDYKGIKASQTLMVPMDDAVELWDVRLKNTTDKERRISVFSYCEFSFHHIMIDNQNFQMSLYCAGSSYDENIIEYDLFYEEFGYQYFTSNVTPDGFDCLRDSFLGAYRTEDNPIAVERGTCSGSHELGNNHCGSLQKDLVLAPGEEVRLIFMLGEGNREAGKKIREKYSDMANVDAAYAQLKDYWENKFAQLQIKTPNEGMNTLINTWNLYQAEVNIMFSRFASFIEVGGRTGLGYRDTAQDAMTIPHSNPEKCRQRIVELLRGLTTKGYGLHLFSPEWFDPDAKKEKKKPFKSPTVIPTVNANDIVHGLEDACSDDALWLVPSIIEYIKETGETGFADETVTYADGGEGTVYEHMKRILDFSAEQVGATGICKGLRADWNDCLNLGGGESAMVSFLHYWAICHFLQLAEYLGRTEDVEKYQAMRERVGNVCNRELWDKEWFIRGITKNGKKIGTSEDAEGKVHLESNAWAVLSGAADVEKGKRAMDSVDKYLFTPYGILLNAPSYTVPDDDIGFVTRVYPGLKENGSIFSHPNPWAWAAECVLGRGDRAMKFYNALCPYYQNNMIEIRQSEPYSYCQFVVGRDHTAFGRARHPFMTGSGGWAYFSATRYMLGIRPDFEHLTIDPCIPADWKEFSAVRRWRGAEYKIHVENPDGVMKGVQELYLDGEKVERIPVMAQGSRHDVRVVMGMIKFGTGGWRAVIGDDFTKANIQLLAQGLVNKMKSEGVTEQGIVMGYDRRFLSKEAMQWAAEVFAAAQIKAYLINKSSPTPLVMFYVMKHDFPYGMMITASHNPAIYNGIKVFTAGGRDADEIQTKDLEDYIADIASDGVCAVAYEDGKAAGYIEEIYPLNEYIDNIIASVDMKAIRDADLKVALDPMYGVSETSLKTILLTARCEVTTIHDRHDTLFGGKLPAPSAATLHSLQNYVVEKQCDIGIATDGDADRIGVIDDKGNFLHPNDILVLLYYYLVKFKGWHGPVVRNIATTHMLDKVAEQFGEKCYEVPVGFKYVSAKMQETGAIIGGESSGGLTVHGHINGKDGIYAAALLIEMLAVTGKKLSQIMDDIHAECGEIHMEERDYKFTLEKKLKMQEVLMEQKQLPDLPEEIDHVSYLDGSKVYFKNGGWVIARFSGTEPLLRIFCEMPDAVEAADICTRYEQFLDLMEKKRRLSSLKKKIIVFVILCWGVPIAVFFAYTTSSYRKGIIEKTEGLMEDQLENMASFASIRIEDAITLCQRPSYEKTWENAWKKYLRGDYSRNDYLQDVYTSLRGKFYLDERFNMYAYYCYGTEDPESFSSRTGISLKSYVDEIQPYLKDVIDSDSAYACVRVVDGRIFIVRNLYTTMDYTRYGTLVVELNRSKVFQDVDTGLLNDMVVCFGSRDARVDFVKNEEKSDKEQLLEQLLQKYDGVSNHTFSKAEDATYRAYLYQERRDDFHIGIVLFARKSELYSGLYQFYTIVALMFLLLIPLFGYVVYFIRRNIQHPIDWMLRASGRMEAGEMGITVEGDMPNQEFMQMKESFDSMSAQVKYLFDSMYSEKLARKDAQIQALQAQINPHFLNNTLEMMNWQARMSGDTVVSKMIESLGTVLDYRMNRANVKEIHLAEELQCIDAYFYIMSMRFGQRLSIERKIDDDLLYLMVPPLILQPIVENAIVHGVETVKNGVIRLHVYHDDENVYLKVRNTGKKMTEEELERIHAILEGDESKLPKNTGRHTSIGIQNVNRRIRLVYGDEYGLSIEQEEDCITVSTITIPYVDHEDEISLKERSEAQNELKNIARLNKMKKKVLSMMLAGAMTVSMLAGCGAGSDEAATTDNTAADTKTETAGTTEAGGGTAEASGNPVTLRTVSMFGGTDPNKETYEAINKEFMEQYDYITIEDNSQTSDEEWKAAVNADFSVGNEPDVIQFFTDATADSIIATDKLVSIEDIRAEYPDYAADTLDSALQAAANTDGVERAVPTTGYWEGLYCNKDLFDQYDLELPTDWASMETAIETFKENDIIPIACSLNNVPHYWIEFLMLYASGVDEYTSIPTSAPEGWVKGLEMFKTLRDMGAFPEDTDTVDDAYTGQLFRDKKAAMQLDGSWYAGNIEDTDNTVVIAFPGVPDQKAEAGSLVGGISSGFYITKKAWEDPDKRDAAVKFVMAHTCQAGVQRYWEATGAVSQAAVEVTPVEGATPFAQSIAEYTSNATAIVAPTDSRIGDAYKTLVVENVKVSTGAMSAEDAINEALTLVQQMLYKKKWPLVVFLVPGLLFMLVFLYIPFVQNIKNSFYDMTAIIEMPGTEWKFIGFENYKKLFTDPDVRTALVNSLKMMVLTVIFEVGIAFVLAVMVSQIKKLQQLFRTVYFFPVVISATAIGLLFKLFYNYNGGMLNQILESIGAKPVNWLSPSLAFIMVCIPTLWSYIGFYFVILLTGLSDIPDDIYEAASIDGCSRFKQVFYITLPMMKPVFFTSVTLAVTGALKVFDLPWVMVPNGAPQGLTHFLGTYMYQQTFGLNNYDYGSTLAVLIVVLGIVVSKAVGFLTADADDKEAKKRARAEKKKGVAMDAAVSVTTVRKKHRRIGAGTVVIYLVLIFWAVLTIFPFVWVVLNSFKPSAEVLRSSFSLPETFTWMNYQTAFERLNVLRAYRYSFVISGTVTVGVMVFASLMAFGLTRYHFKGKELIRSLIVASLMFPVFSTIIPVFKMMVEWGLLNKSIAVILPQIAGNLSFATIVMTGFMQSIPLEMEEAAYMEGADVFKVFGKIIVPLCRPSLATVAIFSFLWSYNDLFVQKIMMRDPTRYPISTLLEQISSQYGTDFGLMAASVTIIVIPVMIVYVLLQKNIIKGLTAGAVKGMYKVMIVDDEPIIVEGLSRSIAWEKWNCKVAATAHDGLEGKKIIEEIHPDIVFMDICMPEMDGLAMIAAIHSQFPDLEVCVLTGYRDFEYAKEAIRLGVTRFLLKPSNMDELEEAIGKMCGNLKRKGITGDEPKRDPQDEEAAEAHKESASSSFIVKNALTYIEENYTKKLTLCEVAEKTYVSQWHLSKLLNRYTGQSFSDILNHVRIEHAKELLKDPSLRIGDISEQVGFLDLAHFSRVFKKQEGVSANEYRNQVLGKMTRESYEKITGILRGHPRRIRLVCLLNHTLTGFIFVLYPAFLLLLFLEGSTFFLRALLVPAISFAAVTLFRRIFNAPRPYEKFGLPPAIEKDTAGKSFPSRHVFSVFIIAATIFYVHPSAGILLGLLGVVLAVLRVIGGVHEPRDVIAGALAGILCGVLGYYVLMVYAIIAGGVFLSDLILKRYMDKKYARKVRHPRLGGRIVLEKYYNKGAALNFMVKRPNLLRIIHTVILVVVGVFSYFLMRLSGHALEKTGVALLLGGGLNNLYDRYTKGHVVDYFHLNFGPKWLRAIVFNISDFCIFIGALLAVAGSEVSMNIIRAKDYQDMSRKAANIISAQIIMKPDCVLGLATGSTPVGTYHQLIEWYEKGDLDFSRVSTVNLDEYRGLAHTDPQSYYYFMQENLFDHVNIDKTATHVPDGTNPDAADACVKHEQIIKSLGGIDLQLLGLGNNGHIGFNEPGAAFEKETHLVDLAESTIRANARFFTSIDEVPKQAYTMGIRTIMQAKKILVVVSGEGKADIVSRAFFGPVTPEVPASILQMHPDVTVVCDEAALSLSPLMRIKNALVYTVEHGFEERDVRIKNGCFAGSEAAGTDGEEILDAGGDYLIPGLVDIHFHGCAGHDFSDGTPEALQAIGAYELRQGVTSICPASMTLSEETLKTVCANAYAYTKRPEAEQDTGARLIGIHLEGPFISMEKKGAQNPAYIRNPDVEMFLRLQEAAHGLVRLITIAPETDGAKEFIRRLADQVHISVGHTCSDYETAYRAFSQGADHVTHFFNAMPPFTHRAPGVFGAAFDAKHVMPELICDGIHIDASAVRVVFSLFGAERMILISDSMMATGMEDGAYSLGGLPVTVRGNLATLEDGTIAGSATNLMDCMRKAVSMGIPLETAVRAATYNPARAIGAADVCGSITAGHRGDCVLLSKDDLSTKKVIFGGKVVAMTNQNIKKLVTAALLAAMTCVATMIIKIPTPTFGYIHPGDGFVLLCGVVLGPLPGALAAGIGSMFSDIFSGYVTWAPATFIIKALTGGIAGLLFHRFKNTLHSKKGRYAALAIGGIVGEAIMVIGYFLYETGLAALGSGALNQASIAAGIASSATGIPFNIVQGVVGIILSLILLPVLSKIPDVRDWIERMYQCFVFQARKKTIPANWHGQFNRNWTFLSIHLVLYSYASTLKYKLLYESDRMETSMNKKCRILLYVLSIVMVAGCITAVARTKGSTPEVKVPGEEPAAVVSGEDTEHAGADSGADRAPAREENETAVETTEAEERTEAAEVAEEAEAGGQAEADGSTTILFTGDVLFANAFKAGYDADGIKGVVAPELLEELRAADILMVNNEFPFSDRGTPMADKQFTFRCSPGYVKALNEMGVDVVSLANNHTLDYGREALSDTFAALDGAGILYGGAGDSAERAKQVQVIEVHGKKYGFIAVSRVVPTADWKVENAVPGLFSCYDTTALVEVIKEARETCDYVAVYPHWGVEYQAYPEANQTQIAKACIDAGADVVVGSHTHCLQGVSYIDGKPVFYSLGNFIFGQSIDRSAMLEVTIDAAGRASYRFVPVYAAGGVTYPAEGGQAESVLNYLDGISEAAVASDGTVTEDMSYMETYKEWCTNPYFDENTKAELAALETYAKQNGFSNLRWYTDDGYSGANFQRPGFQAMLADIEAGKVGTVIVKDMSRLGRNYLQVGMYTEMIFPQKGVRFIAINDGVDSAQGDNDFAPLRNIFNEWLVRDTSKKIKAVKRSKGMSGKPITSKPVYGYLMDEDENFIIDEEAAPVVKQIYNFCLAGNGPMKITWKALLALFFYTLGVVGWFYVGGWMILRGPVRGVILAHMAGDLSLIKLAVALVQGFVYLSLAGGVWCIGYMLSDHFRKDEMILKVPSYYEKFHCIADQCKDNCCYGWEIDIDEGTMDYYRSLGGELGKEITSHIREGEENTMIMREDGYCPFLNEKKLCDICIKMGEEALSEICTEFPRFTMEYEDVREKILSLACEEVGNIMFSTDEKITWQEHEMPDFCGTGDDAEAAYDADGALYGNDEAACEDDTSDGEGYDDDEEVSVDADQLNAVSKAAVALLQNREKPVAERAAEYLLYCKRMQQELYGYHTGGEVSGQEQEQRESRLIAECREKEVTPGEAYAAFLARMERYEQLEVLDQNWEEEKKRLRAAFHEDNYLECIRNFHAAQQGREYEYEHLLVYFTFRYFMRSYYDDNILNKAQFAVAGILMIRDMDALRFLENGGTFSVEDRVAVAKLYSKEVEHSEENMEFLEEDFQFEDIFAPEQMIRQLFFASMKVILVNGSPREKGCTYTALCEVAGALEKNGIETEIFQVGAKPIAGCIGCNVCLKNGRCFVDDPVNEFVEKAKTADGFVFGSPVHYAAASGAITSFLDRAFYGKGNVFAGKPGAAVVSCRRGGAASAFDQLNKYFTINSMPVVSSQYWNQVHGNTPDEVRQDAEGLQTMRTLGSNMAWLLKCIQAGAAAGITFPEREPAMKTNFIRMRNRKKHMKLPNGFGSIKCLSGNRRKPYAVYPPVTEWTPTGPVTPPALAYTETWEEGYELLTAYNMEKAGKIKINRSVFIERTPTFAEVYQQFFDEKFHNSPKNFSKETIASTRAAYKNCSAIHDIPIGNLRYDDLQQIINNCPLKHSSLELIVSLLHQIYAFAIKYEICEKDYSAFLYIPIPDDDESGEPFTLDELNILWTNKADPIVQMILIMCYSGFRIRAYASIEVHLDEAYFKGGVKTAASKNRIVPIHSCIQNFVAERYDNTKALQNLLGCTPALFRKNMYSTLEKLSISYSASGKKHTPHDCRHTFSYLCEKYNVNENDRKRMMGHSFGNDITNATYGHRSINDLKTEIEKIRFPMYETYRKLRNSLGYKDSDVAKGTGITKSTFSDWKTGRSIPKMDKLKKIALFLNTSVDHLTAEENITGTMTTYEIIINLCKQHNLAVTALEKDLGFGRGSIGKLKTGQTSAERLQKIANYFNVSVDYLLTGMEINTKEKYDKTTRIAQEILNNKYLQQLFNAAHDAPPEDLEAARALILALKKKGSKMYRWKKKWSEEQLSRAAGVSRSVICKLENGANVNPTAEVAFRLADALNVDVRELFYYKGGEQDHGGMVDEAEKCRREIIREVRSIQNLWILKQIWMVIKNIQNMNERVREVRKKLGLTLEKFGSQLGVSKVAISRIENGINNVTEQMCKSICREFNVNETWLRTGKGEMFIPQTQNQEIIDFANRIMSDEDESFRKRFVSALAKAKPEFWDDLERIVDETLNKDMIEHEKDILEKLGKALPHMSEFDKGYLTRMAEESARQAVDDEKKSKELVGDRMSQREGEKALTQRVSVVAAAKEIGCHPEYLRRQMKAGAWDLGNVVKPAAKGGNNEYFIFRTKLDKFLGKEGEEEMTEYEMVDLIKDTVSLLVTFGAVIGSLCLFYAFCMFVEVTGDFFEAMKEKMKLFRTKRDKFLGKEGGEEMSKQIIRCLDCEFCEEYRKLGNTRYEFFCKHSDQEYIHDYFEEHRMSSMAGFLGFGKMEVPLKTSPAWCPRKKSKGMKLLGEIVVKNLTTLTDAAALIHVALYLTDTESVAEDKYHVKMNETVTGKLVIVIAERMIRQTVAEYLKERVNAGNVQDEREDKTGDSREQEVADEHMSIKFGADIYAPEEVNELARASIGYIESDVMDIKKRYVTLGFHLYEMDQCRYYEDLGYENLYECIEANFAMDKSAVSRCIGVWKAFAAVDGDGSRKMWVDDRYKDFSYSQLTEMLPMSERDRYRISSDMSVKKIREVKQRLKEKKSSENMKPVVEQEKDKISARGTRVNVREDDVVATSQLEDAVKDQPVEIVADQSDQQRQPDFPDMKNMQEREDFVNTYKDWKVWCRNELTEEVFYRYDLPDGAAIVVKVFPYIPWGNKKEAEGRRLYLLKPGYKHFADCESNMTSLKEYLKDLKKKKMEALVKHFGAGLLAMAVIAALAVIVLGIVKSDAVTAQFQDTLTAFFTNIRNIAGFMEKEFDFTPTEDQFGVFWKYLMQPEVTGVNYSNGMLWITDLSRGRYPVQDVVTDKFLTQFANTIANSANKHFSSADRVLEADTRDLRISILHPSIARTGMAISLRKSPPVLRHTEESLIASGFCSREVLNLLINCVKAKLVIVFGGEPEAGKTELAKFMMQYIDPADRVITIEDSLELHYGEINPGHDCLELQVRDGFDYKAAIKASLRQDPRWLMLSEARSSEVVSLLESWSTGIAGFTTIHLDDVRKLPDRIQNMMEDKKDVERLENRIYSDVNVGVLIRMRTEADGSIRRYLDQLCFYTRENGENHMNLVVEDGRMADGSKEFPADIMKRMREAGIIDPYRCTKGIMNLQKEVHRYGYNFEWKTYLLTIFFVFLLIGVVGMFFKLRISYIVAVGVVALSMLPVLIIDMYRRMFEQKRFADATDYMEQILFSFRKERKILPALRECETALPDGQMRAVIREAVAYIEAGNARTEEGVYPEALALIEKKYACKKIHTVHELLISAEERGGDVSTSIDLMVEDIEVWKRQVYELQKDKKVGHTDCIFSIVGATLTSGLAVYLMDQVKSTMGSDEVASIFTLLPVQLTSFVLILICLFTFAGSNRKLVQDWMDGKKKKDVLHAYEYLTNYDAGKEGRRSILLSLPFLIIAIICVVLDLIAVAIIFAVLAVFMLFQHKVNCSVYRSDVKNALYEALPEWMFDMALLLQYNNVQVSLAESISHAEPILQAELMALVERIRKDPDEIQSYLLFFANVDIPEIATCMKMLYSMSNDGTGNMQVQISNLVAHVNKLREKELELKNEKIVFQARMMVMYPVAATTVKLLVDMASGTMLLFQLFGTMIMKVVIEVYTILWILLLTMSTGLSVTVAEERAAQAKRVKAEVVAEIENSNFNPDVIEACKSSASVSGFDLSVTPCTYDQAHDVTSAEVALTYTYKIPLLGIEQTRTTEGIARMEEVVNELGLGILIMAISSGFVGLFVWVLNQISAWMEEVVKELGMALLYMGTGLALLALVFLALKSNGVLGRIVLAYMNGLTGMDFLVKHFGMVVLYAACAVVVLGLVFLPGQSGLLNHIGSTMSGWRATDTSGYTVYVSESQKGYPVVEYSRADALTTGTYSISDIITAKDCNGYDARLVVLGMTLPGSGEAVIDRSAVELAFPVRGMYTLRVEARDSSQRTVIKKLTIPVNMKNIAAMFGVFFLGILVVACVMTSGGRSNREMELADNLPAAVEETVSELMEEKNYDITSENEMIADMVEDLSRKLDSNSDITVNIENIDEAKGLMSIKVVASYQHPNGKEGSVSCERTVVFNKLQDDPAELCQVRFLVDDARIYKTCNVWPGDTVSAPSEPTVSGKTFDCWVDVEGNTVDFTQPVTQSQVYYAKYSMKMKEVWKRTTAFVAAVAISIGMFAGTPVTAKAADEAGIRAFVTRMYEVCLDREPDAAGLDDWSNRLATGQEQGANIAFGFIFSDEFRNLNLCNEHYVDAMYEAFFDREPDAAGKADWLGQLNSGATRGHVMTGFVNSQEFANLCTAYGIDQGSGDWSADNIPVSGSCAICDSGSHEVTPEIQAFAERLYTCCLDREPDAAGLNDWSTALANGAKGSEVASGFIFSQEYKNKDASDTQYVLMLYKTMLGREADTPGVTDWVLQLRNGASREAVYNGFVGSTEFANLCQNAGITVGGAIADNGTTGRQSTGEMVKNMYYDIYVDGEYRTTEGDVSWAVEGTLVNPADDFLFSHRVEGDEFIAYEGATGKVNIISNGDVIIWDMLRESKNLKRRWIQGIFAVAFVIGFFLMFAGSSVTVKAGTLEYHASISSSMSGNDITFTCDLDQTIDGQQMSYQWQENRGSGWQDISGAIGSSYTVGKTGRGGYQYRCAVTVVINNSYSLLNEDYKAFLHREGSVPEFQSWWPHLYGHTQNSYLLEIYDRIGISPVNEAARVATEMVFSTEYMAKYSNSNLNYSTDTNLATRNGPKQLIVDCYHFLLQREPSDSEVEHWYNEYINHNTKNPLIEYLDPATGTYQRFRTYAGMGYVLNQIAASDECASKMAAAYYYDGNQGVFLYTESDIETRSDTYHVTSDVATIPENAYQVTLQKGNGVQSVSGAGSYTVGQSVTINATLATGYHWKGWTGTYQTITKRYTFSMPGQDVSMTASAEINHSTLRVDPNGGTWNGSADVQSFSGDYGTTKSIPDPVRPGYTFAGWVKSDAFHGSLNNAVYTFGAEDGATMAKGSVRKKGKKWYYRFYVEDASGNLVQKEYAGTESKSETEKLLRQAMDDYESKKFVAKTDNLTVGELLDMWAEEELKVGTLSNGTVENYLGAIRCIKKHPIAERKLKTVTAEHLQAFLDLLTFGGEFPDGKVRKGYSKDYIHSFSAVLQQAFRFAVFPKQLITFNPMQYIKLKKQAEDVDLFSDDEVEEGIQPISHEDYERLIEYLKVKNPPAILPIQIAYYAGLRIGEVCGLTWQDINLEEQCLTIKRSIRYDGTKHKNIIGPTKRKKVRIVDFGDTLTEILKTARKKQLKSRMQYGELYHRNFYKEAQDKNRVYYEYYHLDGTEEIPVDYKEISFVCLRPDGCLELPSTLSIACRSVAKRLDGFENFHFHQLRHTYTSNLLSNGAAPKDVQELLGHSDVSTTMNVYAHSTRKAKRNSARLLDKVAGNDMDQKKIGAFIAQCRKEKSLTQIQLAELLDITNQAVSKWENGRGMPDVSLLQPLCDALGISLNELFSGEHISAEEYKGKAEENISKLYKEKQIANLKPIKYLFSICSNVTLLVAVIELAVGFIGNFFNPTILEVMLLNASVWIILFLISVGKLTYDKKKLKNLKHSGTCIDSEIKDIIPASWIRVGNYISCRIVCGFIYEDKEYKAVSNYYVLTPFQRKEDLYANVFIEQNNPTKYSIELFQEGRMKGATSIQERLWELRKDKGLNLEELSELTSISKSALGSYEKEDYKEINHGNLITLADFYGVSLDYLFCRTENRAEINTPLRELHLSDEMVALLKSGRINNRLLCELATHKDFIKFLADIEIYVDGIATMQIQNLNALVDTVRHEIIERYRPGEDDPHLKVLQAAHISDDEYFSHMVLDDLNLIIRDIREAHKKDSESAPQTTVADELKENLEAVENFKGSRDEKLVVLYCKQLGINYKNLSDEEFRWLIRILKKSKKMGTPISQRKKRMTGGVSLTTNYAGNAXXXXXXXXXXXXXXXXXXXXXXXXXXXXXXXXXXXXXXXXXXXXXXXXXXXXXXXXXXXXXXXMYCRMLDAMLSKGQEDENGILFVCFPITGIAAVLSRSPMTVKRSLNELETAGLIMRVRQGVGEPNRIYVLIPGKEDAALAMPDTSKLEKLNRELEKSEKKLRKAINDEKALQHQLKQLTRKERTHRLCTRGGMLESFLQEPERLTDDDVMLLLKLIFHRQDTQELLKKLLEREKPETPMRTIFAEYNPHRNSIDIYTSAGYMLRIDCWEAEKDLKTTPGSDCALNALAIDKPLEYAKLYLDMTIYETIKAAISVKQAAEHYGLKVSHNGMACCPFHNDRHPSLKLNEDYFFCFGCGAKGDVIDLVARLFNLSSYEAAQKLALDFGLDPKPPTAAAMVKPKRPYIRQFREDEMLCFRVLTDYLHLLEDWKVRYAPKTPEDALDDRFVEACQMHCHIEYMADVLTVGDLEERVALVDKLMQDGKIAFLQEYTAQKKKKVAHHGEEPENAMAKNRKTPDMNLPMWFDGQNINEALFCEEFLQERRIIFANGAFFTPDGRVTDDLPLRGEIYDKLKFCAVNNIPRKITNILEVLKLEAQVPDFPPEQDRIHLSNGTLLLNGTFTEGRPAIVRSRLPVAYNPDATAPVIWLNFLDGLLYAEDIPTLQEFIGYCLIPSNKGQRMMVIKGNGGEGKSQIGAVLSTIFGTNMKDGSIGKISENRFARADLEHILLCVDDDMRMEALRQTNYVKSIVTAQGKMDLERKGKQSYQGWMFARLLAFSNGDLQALYDRSDGFYRRQLVLTTKEKQVDRADDPDLAEKMKAEAEGIFLWAFEGLQRLVANNFKFTESDRIRENREAVKRDNNNIFDFMESEGYIRRKADASISSKDFYEIYRMWCEENSLAPLKARSFSDAMIANARKFNLEHCNNITNSAGRRVWGFMGVEAIARPHINGFYGDSPCTYVPEDIPEEWRQVEMYAAKERETLVIETAHILSFGLFLCPQAFEKVSVDTGCKRKLTQNSFMQTGKKIVFNFPVPVDGEEVKELPLETETTAETVVLLSKGAKGPVDLCSARTEVERRLVDSRKVKVDFSLENMDLSEFKGKATYEQIKAYVLEKTGLKVSSLYIAQIKKKCGLDVGENFNLPKSENARQPQCTPEKEEAIMQAFKHFGIVMEKTVTLEEALKRIEELEKENAELREELEYYRNRKLSGRQKHNAKWMAIYNDFVVGYESGMTMVEIAKRNNVSERTIYRYKAYYDKMKKKEEMAEDKKKEIAVIEITEEYMKDRLYEFRGKKVMLDSDLAEIYGYETKNFKRQVKNNIAKFEGDDFMFELNDEEVENLSRCKNFTLNMGRGSNIKYKPYVFTEQGVYMLMTVLRGELAIKQSRALVKTFKKMKDYILENRDLIGRREILQLSMETANNRIEINKINSDMISLEKQISDVAEGLKDVVTKSELADMMNSFVSDDDEKWLMFNAKFSSADEVYESIYRQAKSSIYVVDNYIGLRTLVHLKNSPTGVNIILFSDNVGNNRLHNIEYTDFRKEYPTVKLSMKKTGGIFHDRFIVLDYGTADERVFLCGASSKDAGARITSSVEDYGIAKYNSVIAGLLKNSPLVLPKMEIVGEYSDEWHFGKNIKGRQEFMQMLNAIEDGKDGVDFVLVLKLSRFGRNAADVLSSLQLMQDYGVNLICVEEGIDSSKEAGKLLISIIAAVAELERENIRVQTMAGREQKAREARKKGMGKNAAEGNRKKGKIAEEIRKRIGRSVLIAYIVVEVIIVIIMGQTVYYNKKAQLTLESESAANRLAGFFEKYERETQTLALNPQIQSVLSETKAGDNILSAKAMGYVEKYLVDAAGADSENVMAVWIADLDASVITQSDGYTSPDGWDITGRAWYSCIETGKTVLTEPYIDSSTGEIILSAATPIYDEGGNVLGAAGMDISLDHVTEVLSGYTIGSNGYVWLVSSDGMLIYHPNAELVQQNIADVNVSDNVVNAIVNQSTEFLKYKADGTTKYGSVQLVGETGYLVVSNMPFLEYYQMLFATIGVLLAIFAVGIIVVMRSIDKSAYALSKPIAELNETASRLAEGDLDVELNVMAKNEIGELAESIRATVARLKEYIAYLKEASGALDQIADGKLEIHLEQEYVGEFGQLKEALLHISSSMNDVMRNISASSQTVTSSAGDLANAAQQLAEGSGTQAAAVEELVATATSVAEQVEESKKDALQSAEETQKVTAMMEQSQDKMQEMMKAVQKIHETSKQVVGIIATIEEIADQTNLLSLNASIEAARAGEAGKGFAVVADEIGKLAQESSKAANMTRELIGVSMEEINKGNQIADHVMDSLKTAVEAVDNVNGMIQKTAGNAADQAQSMEQIRVGIEEISQGVQDNSAIAEESSATSEELASQATLLNELVQHFELQPMKIKFAQTIRNYDRKNLGKDLVAGLIIMAVSIPISMGYAQIAGLPAVYGLYGSVFPILLFALFSTSPQFIFGVDAAPAALIGAALLDLHIESGSKEALAAVPVLTAFVALWLFAFYVMRAGKLVNYISAPVMGGFITGICTTIILMQVPKLLGGTAGTGEFFELAEHIAETVGEINLPSLALGVAALVILLIAKKLIPKFPMAVLLMAAGALMTKYLPMRAWGIKTLDAVEPGLPVWSLPDFTAVPVREAVTISLSVAVVIMAETLLAENNFAQKNGYRINDNQEILAFAMGNLAAALTGCCPINGSVSRTAMGEQYQAKTQLTGIVAGLSMIVLLLGGTGFIGYLPVPVLTAIVISALLGATEFELAVRLWKVSRTECLIFAGAFFGVLMLGTINGVLIGIILSFSEMIIRTAKPARCFLGIQPGHRHFRDLKEGSQIHAVEGVLIYRFSSNLFFANIQVLKQDIEDHVTDQTRAVILDASGIGSMDITAADGLGMLYQSLKEKGIRFYMTEHIADLNEQLRKLGLGYMIEEGSVRRTIHIALKDMGIKRPYPLEGGVDNDDRSASRKRADNRVQEFVWAFGAETEEQIEKQILLQIEQLKESGDVENLLHGRWSHMEAMDEDEWLEHLEEHLKEIVNISGKDEKTLARRLEEHRREVHDRIATEHPELAERFKERRHVLDEHLKQRRPEVYELVVSLREKEETDLKMRAAAGINGNLGLTHRTEFARWCFFFFSSAGTNFAVARFNAFTIRNTTSAMIRNGMMNPASLMKIMNARNKFVENHPKFAAFLNAVFSAGITEGTVIEITVTKPGEEPITTNMKVLQSDLDLLDELKNLAQMDYNQEQFFHAQFDVPKMPFYMSYPMQNLYLTEMEYEKDMDRMKELYPKEVGRIVECVEDECDRMEYEGSLMFDEYPDRLMIEMVVDRIQKKVTGEDGGLEAEQFHGGMQPPPGHRPPPPPPPHGQNDHLRELIGVILNNEMYRRRCRHRRCRRWWMRKGTIKAAVLAAVFIGAVLIFGRFMNDTNEDLTTEMKEATLPVITMYQGDQELNELHGYVTEMDAAYMRDTITPVGEDRKLPIVIQTNQTAVDTISYEIRSLDATRLIANADVTSYEERSGKITADLQIQNLLEEGEEYLMIIRLGSGDRSICYYTRIAEPVDCYVSECVAFVKDFNDKTFNDETSGTLATYMERTTGDNTTLQYVSLNSSLRQVSWADFKGERLTEPVPSIKEITPTYNVIVLDYVVSSVNESGQIEYYNIEEYYRVRYTTSRIYLLNFERTMNQIFRGENDSVYDQYIQLGIREANVEYKANEAGTSVAFVQEGELWSYNTVENTLAKVFSFRGYEGIDSRENYGEHDIKIVGVDEVGSVDYIVYGYMNRGIHEGEVGIAVYHYDSLANTDEELVFIPSDKSYEVMKSELGQLMYVNEGGELFLMLDGCVYGIDLNTLSVRELVTNLNVQDFAVSASNRYFAWMETEGDSQMGSSVIHVMNLSDQSTQEIAAGTGEAIKPLGFMDEDFVYGIARQSDIFEDAAGNVTFPMHQIRIVDVSTKDLTVQKTYEKSGYFVSSVSIEDYTMHLNRIRYNGTAYVPADQDMIMNREGDSGKLVNIATSSSAEKETQVQLTIAGASAEKAPKLLTPKETILEEERTVAIKEEGSTKHYYVCVKGDVVLATDDVTEAVTAANDSMGVVIGDNLQYVWKRSRKSAQPALPDIAVGAEDAGAGSIAQCINAMLEKEGINISVNALIEGGETPKSILNNTMKDMQVLDLTGCNIEEVLYYVSCGSPVFSMTGSTDAVLIIGYDSNSVVIFDPALGTTYRKTLTEADEMFTAAGNVFFTYLVKMSRKEIVVSNVSEEHSNPIAELVQVACRFDSDITLESNNRRINAKSIMGIMAFNPSKGMTVNIVAEGSDEEEALVAMEKFLVCEMEKKTTAKLDETKAAVKAAEAKVAAKVEETKTAAKEATAKVVAKVEETKNAAKETEVKAATKVEEPKKTAAETAKKRKPRTKTAKKAAKEELKPEVYIQYQGREGVVEDAIKKVTEQFVAEGHRASTIKSLQLYLKPEENAAYYVINQKIAGRVDLFMPNDERNLETMPDGALGLIPLESCKELGLKVDQYLVGWREKRQHQHQNDPAFKGYRRDSYIISTAVPRFGTGEAKGVIKESVRGYDLYLMVDVTNYSLTYSVCGYENHMSPDDHYADLKRIIAAVGGKARRITAIIPFLYESRQHKRTARESLDCALALQELTAMGVDNIITFDAHDPRVQNAIPLKGFETVQPAYQFIKGILREVKDLKIDAEHMMIISPDEGGTNRAVYLANVLGLDMGMFYKRRDYSKIVDGRNPIVAHEFLGSSVEGKDVIIIDDMISSGESMIDVATELKKRKANRIFVVATFGLFTNGLERFDEAVADGTIYKVVTTNLTYQTPELLAKPYYINCDMSKYIAYIIDTLNHDSSISDLLNPYDRIQRLVAKYKAEQNMPLSNSQYDEIFRKYDEKQLASQHQLERRTKDVYARIPALKEIDDAIATCSVEQARRLLDGDAAALATLREKLSDYRRQKEQLLQEHGLASDYLKPVYHCPDCRDTGYVNGRRCHCFEQAAINLVYTQSNLKEILERENFSTFSFDYYSADDINPATGRSSLETAKDAVAKCHDFIDHFDSTFSNLYLYGDTGIGKTFLSNCIAKELLDRGHSVIYFTAFQLFDILSKGVFKRDEEALLSHRNIFDCDLLIIDDLGTELSNSFTTSQLFLCINERILRQKSTIISTNLGMNQLADIYSERVLSRISSNYTLLKLFGADIRILKRHRMANIKLHSDSPVSATSVSNTFIDEYMSDANGEFVKIYLYLLRLMNAPQASFSISSIADKFEHTEKDVKRALAYWERMHLLQLEYDNDKNLTGIRMLDSSSRDAAPSDPGTSGTQTEPAGAPAQNAPASAALAETPAPAQTVPAKKSYSADDILNFRQNESVAELFFIAERYLGRTLSTTDINTLLYFYDVLGFSTELIVYLIESCVSNNHTSIRYIEKVALGWADQHITTVEEAKQGSPVLGKMYYAVMNAFGITGRKLVSAEIAYISRWTNEYGFDSDIILEACKRTMASLHQPNFKYTDSILSDWNKKQVHHLSDIAKLDAAHQERKKSSASAAANTASKNKFNNFTQRSYDYDELEQMLLTTNVHMRSIFSGTHPAQTIDRRNVDNVDKENESGGNRIMETKGLAQKTAKAAKVQETCIRIMMYKINFKEPIHIHFIGIGGISMSGLAEILSEEHFTVSGSDAKESDLTRHLEHLGIKVYYGQTAANITDDIDLVVYTAAIHEDNPEFACAREKGIPMMPRAELLGQIMDNYRNSIAVAGTHGKTTTTSMISQILLAAKCDPTITVGGILKVLDGNLRVGKSDFFLSEACEYTNSFLHFYPKYSIILNIEAEHLDFFKDIQDIRHSFHQFASNTREDGAIIINGDIPDYTEITAGLKPQVITFGLSDSCTFHPADITFDEKACASFTAMKGQEALMKVTLHVPGMHNVSNALAAIAMADDLGLAADAVAKGLSDFGGADRRFQYKGCVDGVTIIDDYAHHPTEIRATLTAAKNYPHKRLVLCFQPHTYSRTKAFLEDFADVLSLADVVVLADIYAAREKNTYGVSSRDILSKLRKRGTECYYFPSFEEIEKFLLKNCVNGDLLITMGAGDIVNVGEHLLGKMIRKEMIAMLLAGGQGSRLGVLTAKVAKPAVAFGGKYRIIDFPLSNCINSGIDTVGVLTQYQPLRLNTHIGIGIPWDLDRNSGGVTVLPPYEKSNNSEWYSGTANAIFQNMNYMEQYHPEYVLILSGDHIYKMDYEVMLDFHKENHADVTIATMPVPIEEASRFGIVIADKNKKIMDFEEKPEKPRSNLASMGIYIFSWDTLKEALYAMKDQSGCDFGKHIIPYCHENGKRLFAYEYNGYWKDVGTLGSYWEANMELIDLIPEFNLYEEYWKIYTKSDIIEPQYLSADSVVEKSIIGEGTEVYGEVHNSVIGAGVTIGRGAVIRDSIVMKGTTIGENAIIDKSIIAENCQVGANTELGIGEEAPNKLNASIYSFGLVTVGEDSVIPDGVKIGKNTAISGTTDKEDYPNGILESGEVIIKAGDSVMKAIGIILAGGNNSRMQELSNKRAIAAMPIGGSYRSIDFALSNMSNSHVQTVAVLTQYSARSLNEHLSSSKWWDFGRKQGGLFVFNPTVTVDNSWWYRGTADAMYQNINFLKKRHEPYVIITSGDCIYKLDYNKVLDYHIEKKADITVVCKDMAPGEDVSRYGVVRMNEDSKIVEFEEKPMVSKSNTVSTGIYIVRRRQLIEMLERSAAEERWDFVTDILIRYKNMKQIYGYKMKEYWSNIATVESYYQTNMDFLKPEVRKYFFHDEPKIYSKVDDLPPAKYNIGSDVRNSLIASGCIVNSKVENSILFKKVFVGKNCVIKNSIILNDVYIGDNTHIENCIVESRDTLKANTYYCGDNGIKIVSENNERYVLMQITDVRIRKVEKEGKMKAVVSITIDEEFVVHDIKVIEGDKGLFIAMPSRKAADGEYRDIAHPINSDTRERIQTLILQKYQETMAAEEMSQLKAVILAAGKGTRMKSDLPKVVHTIEGKCLVDYAIEAAEGAGAGEICLVVGYKYEIVRETISHKDVKFVLQEQQLGTGHAVRCAKDFLGEEGQTLILFGDTPLITAETLKKLREHHIASGNTVTVLSAMVEDPTGYGRIIRDADGNFVKSVEHKDATEAELASHEINSGMYIFDTKELREALDLIQPNNAQGEYYLPDTLTIIKEKGLKVDAYALDDPEDITGVNDQEQLAAAAVVIRRRIAGNKAKNRRMFLIVGLGNPGRQYEHTRHNAGFDVMDALAEKYNISISESGHKALFGKGMIGGQKVILAKPQTFMNLSGESVAELLHYYKIDPEEELLVIFDDISLAPGNIRIRKKGSAGGHNGIKNIIAMTGTENFKRIKVGVGEKPAGWDLADHVLGRMSEEDRAAFEEAVKESVKAAEMILEDEIDQAMNDFNRKKRESQSMKTFTQPMQGLKEFEDLEAALPKLSGVIQISGCIDAAKPHMMYSIGNGSGNRIIVTFQEQKAKELAEEYRFFDPNVAYYPAKDILFYQSDIRGNVLTAERINALKMMAEERSCTIVTTFDGLMNPMPSPDQFISAVRKVAVGDVIDLEQLTRHLAELGYEKNYQVQASGEFSVRGGIIDIFPLTEENPFRIELWDDEVDSIRSFDAESQRSIENLDEVHIYPACELVLTKEERDAGIARILAEAKQVSEKLRGEMKTEEAYRVKSAADQVAEEAGELGLSAGLDAYLSYFCEERVSLLDYFGKQDTLVFLDETPRSIERGMATETEFSESMKQRLEKGYILPGQMRELFTCKEILGKLAGRRCISLVALDLKNPHLEIGTRLNIQSKTVNPYNNSFELLIKDLERYKKNGYQVILLSGSRTRAKRLADDLMAEGLNAFYSEDYDHEVKPGEIMTGYGKIKKGYEYPMLKFVVISESDIFGGEKKKKKRKRIYEGEKIASFTDLNIGDYVVHESHGLGIYRGIEKIEVDKTEKDYIKIEYAGGGNLYILATQLEQIQKYAGAGAKKPKLNKLGGQEWNKTKSRVKGAVREIAEDLVKLYAVRQNDRGFAFGPDTVWQKEFEEMFPFEETEDQDLAIAATKADMESTKIMDRLICGDVGYGKTEIAIRAAFKAVQDGKQVAFLVPTTILAQQHYNNFVQRMKDFPVNIDLLCRFRSSAEQKKTIEKLKKGQVDIIIGTHRLLSKDVVYKDLGLLIIDEEQRFGVAHKEKIKQLKTNIDVLTLTATPIPRTLHMSLIGIRDMSVLEEPPMDRVPIQTYVMEYNEELVREAISRELARGGQAYFVYNRVREIADVATKIAELVPEANVAYAHGQMKETELENIMYRFINGEIDVLVSTTIIETGLDISNVNTMIIHDADNMGLSQLYQLRGRVGRSNRTAYAFLMYKRDKMLKEVAEKRLAAIKEYTELGSGFKIAMRDLEIRGAGSLLGERQHGHMEAVGYDLYCKMLNEAVKEAKGIAVEESFDTSIDIVIDAYIPMGYIPNELQKLDIYKRIADIETQEETEEMTEELIDRFGDPPKSVENLLYIAKIKSMAHRLYFTEVAQKGESVRFTLYEKARIDVTKIPELVAAYGQKVTFTADPKNPYFTYHLKKNSRDKNVDIKSVVEQFLADAGGFLAEREAPKEGMRAKRWSALLLSGVMAASMLTGCGMNKNETVATFDETEVPLGVANFAARFLQATYDDFYVAYFGEDVWSSDLYNNGTTMQDNIKDSVMQSLFDMYTLEAHMAEYDVELTEDDKAEIADTAAAFIADNSKDALDALGADEEIVERYLTLATIQNRMHTAIIADADTNVTDEEANTSSYSYVKVSKQSHTDEDGNTVEYTDTELTLLGKTVGMFDTDAKAGTLEDAAEQYDYTVSSGTFTADDSTLDEAVLTALQGLDEGEVSGVIDTDTDYYVVRLDEKTDADATETTRQNIISQRQSDLYDETLKGWEDEHDWTVKDSVWAKVTFDNLFTTTVEDTETETVTESATEMRQETANYWNVVLVKQCNASVPAKTGGRILITKYGISNSAAFASCDDLCLSKFMAKTRKELAKTAEKKFSHFVPKNPPACFSLERSRYALMLRAILALLFAILYLIIGIPVLGIEWIISKFNRKAADISQLRMVQWAFRVILFICGTKVTVIGEENVPKDEAVLYIGNHKSYFDIIITYARCPGLTGYVAKNDMAKVPLLSLWMKRLYCLFINRDDVKEALKTILAGIDHIKNGISMCIFPEGTRNKTDDLMLPFKEGSFKMAEKTGCAIVPMAITGSADILENHFPKVTATHVILEYGKPIYPNELDKETKKKIGAHCQGVIEEMLVKNEKLRMFWYGKRWKKGCLVFLAAAALLAAGCSIETTNGAKVADLDYEIVEEAQIPEKVKAVIEEKKAADFKTTYELDGDLYIVRGYGEQETGGYSICIRDLYLTSNAILFDTELVGPRKGEQVSSGPSYPYIVIKTEKRDESTIFEMQQADIHKVRASVYQQCGRKVLIQLDRGRNKVDIQEGVIQNAYPSVFTILVNDEQEENPPQLLSFSYSDIITRDIRMKLCMELEKVKIHRIQQNGTAVSQITLDDDYNVPDYRPDIMKVLKENGELRFDEVKAANKAVWVKGSLVFHILYQCEQSDGKISCLKGEIPFQEKLNIDGLQENGEVHAAGEIEDLTVGVINSRKLSIRAVVVLRASAEEQVLEEFTSRLELPGDYQQKTGTWGALNLLASCRDVCRQKSEIVLPSNKPNVREILWRSVELRNVESHVEDGKAVVTGEILAAVLYSEEEESERLQWYETTVPLECAADCDAAGENCIFKISAVPLSAELEIKPDYDGEERILVLELSVSVDVRVWREEEMELLTDLYSLREKAVPVVRERIGERLLVKNAAKCRVTEQLEIPESQEKILQICACEGTVRLEKYEPVENGIRAEGTITAELLYITTDDNMPIQSAREIYPFSQILEIPDMQPDVEAEMDCGLEQLSAVMMDQEHIEIKAVIQLNLMAFLPQKIQNIEEITEEPLDMEELQNRPGLVGYIAKAGDDLWTIAKENHTTIQDILETNGWTEKNLQPGDAVLIVKQIGMDQNENKNYNFENDPGQTQPGSAGAENQQGTQDVYGQQGAQGAYGQPDVAANSGMTQPDGQPGANAYGQPGNGYGQESAGQPYGQENAGQPYGQNYGQAENANGQGNVSQPYGQQNYGEQSTNGQGEYSYGQNNAYGQNNAYGQNNAYGQNNAYGQQTNGQQAYGQANGQYAGNAYAGVNYGEATVLNDENGQPVKNSFGMKITFSILEILCCCGCNLITMIMGIIGCVFTSKANSAYKSGDVQEYKRNSKSATICLWIGFAIALVWLVFSIIFSVLYSNDIEDAFMEGYNEAAGVSDDYDTDDFMGDSGDEEYDTDDFLADDSEDTEDAKTVAPLDVTAGDAFDSGDITVNGILVQLPMSYSDFKALGFSIDSEDEEYVSNKNEYYYPTFYDAQGNELGEVYIGNVTDDPQTLADGTVFGFSFTSMDYNDDLEILLPNGLTKDAVNDDFMTAYGEPDYEYESDTGDYQSYQWYSHSDTYEDMDENSISVTFYDGELSDLELMYIGWDMRHFKKRVLALLLAGAVGIGNYASVSASAIKDAQDKKDEAQQELNQVNQQIQNIQSAQNSLQAEMNNYDNQLMSLLTDMDILQSDMDTQEQEIEQANADLENAKAEEQQQYDAMKQRIQYMYENGDQSFLTALVGADSITDLLNRVEYVSDVYQYDRDMLTNYQEVVQQVEDLTAQLESEMAEMEELQISYQEQQSSLEQVIATKRSEMADFDSQLANAQSLASQYAQTIKQQNQIIATEKAKQAAAEAAKKKAAQAAAAAGTTGSTTGTDASTAGTGTTSNTTGNTASTGTDTSTSGSSTSGSSSTGLTDGGLNPSYTTGVSGSDVVSYASQFLGNPYVLGGTSLTSGTDCSYFVMAVYQHFGISLPRSSYSQSGCGQAVSYENAQPGDIICYPGHVAIYIGGGRIIHASNPRTGICYGNATYRTITSVRRVLMQFKQLQDDMIAAMKARDKVRKDAISTLVSAAKKVAIDEGCRDDIREELVDRVILKEIKSVKEQIDTCPASREDLLAEYKTRYDIFMEYAPKMMSADEVEAFITEKFADVVASHNKGQIMKAVMPELKGKAEGSVINQVVAKLCQAMRQKLRFTAVLVVLLIILGTASYREQGKRQKLSFPESLDLVVVAVDGEQVTLREMTFYIAYEEGSMEDAAIIYNPDNTDEYWQLYINHTFLREQAKQTVVDMTIHDTLFYQMATAEKITLSEEEEQYLANDQQDFWSDLTEEQRARLGVDEETIDASMRKMALAQKYQSILAEMEQVDYEDYSIGGTEYEKLLAQHTCELDETTWDRVPFGSITVDHMSVKIGRNDPCWCKSGRKYKACHQAFDEKIAAIAAQGHIVPTHDIIKNADQIAGIKESCKINIAVLDYIQEHIHEGMNTAEIDKIVYDMTTSMGGIPAPLHYQGYPYSVCTSVNDQVCHGFPSKDVILKSGDIINVDVSTILNGYFSDSSRMFCIGDVSPEKKRLVDVTKECVEKGLAEVKPWGFLGDMGQAVHDHAFANGYTVVREIGGHGVGLEFHEEPWVGYNSKRGQEMLMVPGMIFTIEPMVNMGKVDIYVDDANDWEVYTEDGLPSAQWEIMVLVTEDGHEVLCWMKNLGKKAVHGAPGKAASMKKADVPGEWLYFAPEAVGVRQIADALEGTCEMEIWQEAGVLEIMYGGEASMDMEEGKIHPRDQVTAAFAEEHDCDRVYLVTFSAEEYEKVLPVMRHILQECGGIFCGDTEDFKPILTEMDSRISGHTGLLALIGSPVGHSGSPAMYNYSFERLGLDYVYVAFDIKVEEVADAIAAMRTFKMRGCNVTMPCKTEVVKYMDELSPAAQIIGAVNTIVNDNGRLTGHITDGEGFVHNLKDHGIDIKGKKITVAGGGGAATAIQVQCALDGAREISIFNIKDAFFERTLKTAEKIRAAVPSCVVNVYDIADTARMTAEIASSDIFANATIVGMKPMENESVVKDTSAFRPGLVVADAVYNPEETRLLREAKEAGATCIGGKGMLLWQGVAAFKLYTGKDMPVEEVKERFFSMKNLYLIGFMGAGKSTIARALAKKCPSKRIEMDQLIEEQQGMAITDIFAAHGENYFRDLETELLRSFSESTGYVVSCGGGSVLRDENAALMKENGCIVFLRATPETIYERVKDSTNRPILNGNMNVEYIRELMEKRRPRYEAVADICVDTDGKDVDAISEEILKAVENRAMNFEFIRECRLESDELQAMYDNVLQELERAEHYYWRKPQECGIILRQTTERICRIYNTYYQIGYPGNASLEEFLCYTDENEHNVMVSRFLSVVRKEQRDRLNKLRVLGDDCIWGEEAPDQGMTFEDRMGQNARHMMETMMEVTKDMCEKINKRNDVFDEFFLEEALPETKEEAGKETLAAAEITTSAENTKKPLFARIFHRMKKSVSTVYGVLLVIGFILMALSFAFTGKKNTSFAEDSRRIELQPDRVVEVSEDVREYYFDSNQMQSEFSELTFFSVHQCVEVYADGEQIYSLEKSSTVFGRTPGTGWNTIQLQEGVKSFSVRIEAVYPAVRDHVTRFYQENDGQMVYQTMRGSVPEIMVSTVDGAIGIMLLIYYAIARRKVKMGPGILYFGIFTLMMGMWSMNEAELVAYMVKSRTAASYTGYMMIMLMIAPFAAFLQEFSEVEEKYISNIICICSFANVVVCTVLHMTGICEFKNTVFCTHFLMACDLLYLLYVILQRYRARGMDRRVRVCIWGLVILLVSYAVDMSAYYIGWRRTDVIGRFGFLLFICLLAREATAVSMEKIDEGRKAEIYRELAEHDMPTGLYNRNAYDEWASENARDRETAIVTFDLNDLKYCNDTFGHAAGDKYIQDAAKLIAEVFEPAGVCYRIGGDEFCAVIRHARSEWVEERLRRLEYLEWKYNEGKMDVPMRIAYGYAIFDEQYDKNMEETRNRADVKMYEKKRAIKAEERKMPFINTKTTVSLSKSKKDSLTAEICRITRECLGKGENWVMTGFEDNASLSFQGDSTAVAYVEVKTFGTPSAAGTSQMTGKLCHLLSGELSIPADHIYVAYFPTDNWGWSGSNFMEIARYIIDNNTTVRQAAKHFGISKSTVHKDVTERLVQINPSLAAETRKVLDVNKSERHIRGGMATKEKYLHQHVMKKIALIMDGWKRFFTYAWPAGMLERIRETNEDVNLYIFNSSGDWSRDEDYNIGEYNIYRLPDLNDFDGIIVDLNNIRYSEVREYVISSAKATGKPVISIANEIADFYYVGIDNYSAMQEIAAHLYEVHNCRRFWYVMGPDDNYESNRRVAALRDFSETHGILWDARDLYCESYEYKCGVHGFEKLLTLHGKLPDAIICANDNIAVGVCETAEAHGYKAPDDFLVTGFDNFDKASYYSPHITTVGHIREQVGYHCADILLRLWRGEMVPRFNYTGHQCIFWESCGCDAGIAVDQAEHSRAQIVYGIETDEFEEQVLSLEYELLQCETVREMSRWIPKCIPAMRCDAMYLIMDEHMNDFRELSDYYDRHLIEDEEFCVHGYPEKMQMEFAYEDGVVKESEETVVEGIFPTFDYAEGGKDFLFLPLHFREHTVGYFVIRNAVYLMEKQYLFQIINVLTSAMENLHKKERLAYLNQVLSELYVKDAMTGMYNRLGYQKLACRMFEKKKQTGENLSIIFMDMDRLKSINDEFGHIYGDWAIKTIASAILKYIPEGAVAVRSGGDEFLVVLEQTADAEIEKIIGEIREDIRERSAEMKLPFPLTVSAGCVHTDMTTGCDLDDYVREADAIMYEEKTAKKANRTMKIERERVRETFREYTDAYDATDEKIKLKIDHTYRVAELCERIAKAEQMEKTEVDLAWLLGMLHDVGRFEQLRRYGTFSDADSIDHAALGADILFGGVLREGEGLIRTYVDDAAEDEVIETAIRVHSAYRIPEGLAPRTEKLCHILRDADKIDILRVNVDVPLEEIYNTTTEELRNAAVTPAVMDSFYEHHATLRSIKRTPVDHVVGHISLVFELVFPESVRIVKAQGYLEKLLHFESRNAVTNAQFAELRAEMERYLKGRMKKHDRLPDFSKLCAPEQTPISFFLSQQIYFFFLGSIGGFLWEVAIFLYRDKTFANRGFFYGPWLPVYGIGAVLFYLLLGCRRKKIHPAGVFFLSAAIGTSLELLIGWFLDTFWDLRYWDYSGYPLHFHGYICLYATVGFGIAGVLWICVLEAPLTRLWKRLSPKVRLGLNTLLLLLFAADCAAALIFPNRGAGITFPMEMNNNFSQEKVIVIDFGGQYNQLVARRVRECNVYCEIYSYRTDIEQIKAMNPKGIILTGGPNSCYEPDSPTYTKELFELGIPVLGLCYGAQLMMHVLGGKVEKAPVREYGKTEVFVDTTSPLFGDVSEKTICWMSHFDYISKVAPGFSIAAHTADCPVAAAENREKKLFAIQFHPEVLHTQEGTRMLHNFVRGVCGCAGTWRMDHFVEHTIEAIREKVGDGKVLLALSGGVDSSVAAGLLSRAIGKQLTCVFVDHGLLRKNEGDEVGSVFGPDGQFDLNFIRVNAQERYYAKLAGVTEPEQKRKIIGEEFIRVFEEEAKKIGAVDFLAQGTIYPDVVESGLGGESAVIKSHHNVGGLPDYVDFKEIIEPLRNLFKDEVRKAGLELGIPENLVFRQPFPGPGLGIRIIGEVTADKVRIVQDADAIYREEIAKAGLDRSIGQYFAALTNMRSVGVMGDERTYDYAVALRAVNTVDFMTAEAAEIPFEVLQTVMSRIINEVRGVNRVFYDLTSKPPGTIEFEMQYVRKLSKGDKVAVVSLLRDIVGNIPVDRSLLESDAPFTKGLSEKMDRISYLLQTIMDYMLNNDLNIDKATFFTVIIGQITIYGILLTFYQFVASYQGNERSVTRYLGINITEYFVKKKIKIFNSIISKKMFGILLILEILYKPFITIYGETIGTSTTSIINFIWFLFAIGYFILFVMLFIQCTKSILMIKMSSDVKRNGYIISEINKDFLKKTMKEQISKKAIDLLRRDLANLRDVIQVDDNTELQGRYNHLIQLIFTGYVERKEYEIYNIEKRGTISKNQVQWIDNSNCEVCLLQEIANEVYFRLDEQNVRLIMNFYIDLIRLNLIRSKQAGCSRVRFNRYDRLSTKVEKKIFDVSSWKDVTLKIYQKMSDENKRELIRLLQRDVNQKQDFYEQYCKECINDLISAEIDCVFLGKREQKDFVKIFSQITEDKYFNDVYSQLIRDKIIYYNRFDAGEIIGQLNGKNCTYLFVYIVLYYSIYRFRFDWEYINIKVLRTLWKQHSSLQDDAEEVIEKIRNSNIGHRFEKKMYFKFMEYINASFDGELFNMVYNDKILDVFYVWIIKTSVINQYDFMYSIYKDNLDIDIQIAIINDLAKHDELMECESIYAWIQYMRYRTFSMYKFVPEKLNITLRSLLLTSINAVIVANYAHVNRYFYGDDIGAYLLVKIHELSDKARKQKQIKEIIKNAFIASSMDIDEYINMIEEECYKCRREINYVQKEKMKEYLMKTFMIRFFVCKDVSTLILNKTDEIQSTLSNMSEKTLKPSFIYSYAIFESTLTEILRYYLLAFPEKLDNNITLEKTELLSTSSTHDIILSSVNKIIRKYSCKTLLEYISFFKHSLSLELYVDENKIKKISQLRNSIIHDDAKSELLLLHIDQHILSPYYADVQNYILYFCNLLNDIFYQINNVYKKYTYEFLLRNVWDYTFSTPLLNFDTIWKFGQNGVLQINDNETIMKTISGISSSEHLFLSIFLQQYNNTLNEELHSFHNIPALVSLDSNSKDKLINIITFFKYYPLFFNGTPIRMALAKWYKIDFHTHTPESKCFSDKSVTPEQWLKAAKESGINAVVVSDHNSVGWISKIEEVKSNYEDTNFKVFYGIELCVSSAFTHFLIIFDDKMSVTEIEDAVVSYLGLQRKDWADTTVNVSEDRLKTLCTELNEKIFVIPAHFASNKGLGKSTENAIKKYQEFLCFSAIEVRNDEDAREYNNKLRNNVINKAVLVTGSDNPSNRDENQHSIEGFGKMFTWVKLSTLSFEGLRQVFIDPEHRCINWLELQNIGVQFDPNETTYNYISGIEFEGISHMTKMNMRFSPNLNCIVGSRGTGKSTIVDAINYGVCNETDLTKCKLLEKTLTKDAKISTYFNFGIAKPYVIKVSRRGKQLVSEVEDNNGCVVNPPEFKIDFYGQKEIFSLIDEDDSIANQTTSPLVKMIDDKIAADMYMYSDQIDDAISNMLKYAEEFKSNRRRIKEIPTIKAEMEKADTILKKFKASGIEKARRDFETVDNKINNIEKTFVSELGKVNGAIAGFEDQRRELESRIGELDKTEENVIEIEMFKKLADINQSLIDVLNQKRDAIESMEKAYEVSPTYARREEAHNKYLSALEEVRNTGGEDINGIQDQLQKNTQRYNELVLLLKEQENVEKKIEESINVFVDKRLELSQKRQDVIDELNLESISIKVIPLGHLSRWKANLQKELGKEGTFDSDFQKLVEQSLSANSDWKGYKVLLKFMLMTDTGNIEDVLGPLADMRFAKLWKDKYNNDTLSSMVKVFPEDKLQIKIIDENGSIDINEGSPGQKSAAILAFILNSGENPLIIDQPEDDLDNSLIYSLVVKSIRKMKNKRQIIIVTHNPNIPVLGDAEGIIVLERNNEGKVTFRKDKKTGCIEEKLIREGICEIMEGGEDAFRKREQKYQYKMYYVPDGTKQCGYYECKKCGNRFLSLQTMTRIPCPDCASEVDYEIGPDETLADVTDTAVLLQKIEGEEEVAKMDALLSLAITGGDFNWIMERTTAKKNKYEIDMCNGTIMDKLISFSLPLMLSGILQLMFNAVDIIVVGRFSGSQALAAVGSTSALINVFTNLFIGISLGANVLTARFYAAGREKEVSETVHTAITLALVSGIVMALVGLVFSKGALALMGTPDDVIGLSALYMRIYFLGMPFFMLYNYGAAILRAVGDTKRPLLFLMIAGVINACLNMVLVIVFKLGVAGVAIATVISQMISCVLVLRCLCRSESSYRLRFSELGMKGYYLKQIFSVGVPAGIQSTVINFSNVLLQSSVNSFGSTAMAGYTAANNLLGFLYVSVNSITQACMSFTSQNYGVGKLKRMDRVLADCMILSVVVAVVLGCICYGFGPEILQIYTEDAEVIACGMEILAYTTITYFLCGWMDLFPGALRGMGYSAVPMVLSVIGTVGTRVVWIFGIFPYHRSLAILFISYPASWIITIILQVVCFYFVRRRVHRRSQALAGQEAMEAYYYSKMDKTKQAAYHAMLQGLLALEDSIPMPRLEAEDLYQVFFLLRLDHPEIFWATGYKYRYYPESANLVFLPEYLFEKGKIREHQKAMKARVEKLARAAQNLSEWEKEKYVHDFICENVHYDKLKKPYSHEIIGPLGQGVGVCEGIAKSVKVLCNALGIWCVIALCGNCPEKGIKYRHTWNIVKIGGQYYHLDATFDNTLGAGAQIRYDYFNLCDKSVFRDHQPLIAPVPECTDAQHFYYREKKLSFTKVEDVYKRALQTAKKGKTFTFHWRGGYLTREVLGELLEQISAAGRERGKSARVSVNWQQAVLRFDYVEAGSAPEASVVMEEANEGEKEMTEDLLEQIQRKDAAAFTHGGKFHADDVFSAALLLYLNPEIVITRGNRVPENFAGIVFDIGRGRYDHHQKDSRVRENGVPYAAFGLLWEELGGAILGEELAAEFDEAFVQPLDNNDNTGEKNELATLIGNFNPAWDAQGGSDAAFFQAVSVAGMILENKFERYRGNERADRQIEEVLAAHERAVVSGETAERDAAILILPYFIPCQKRLSETGIAFVIFPSNRGGYCIQPQKREYSLHYKCSFPECWLGLEKEELAEASGLESAVFCHKGGFLMTVGELSDAVEACRISLDSFKEEKAFVNVGGGETADELLRELPGMAEAQIYHMPLPELPELEQDGSYGEVAMEKADWKLRNKDYVKQILQCRPEAVYVEGDVFAAYPVVHLLRKKHVPVLAMAERGGERILVRIPSGSMACTTILVGKKASYDGSTMIARNDDSGSGHFTPKKFVVVHPEEQPRHYESVISHVKIELPEQPMRYTAVPNAVDGKGIWAASGVNEAHVAMTATETITSNPRVLGADPLVVYQKAEDGQPEICGGIGEEDLVCLVLPYIRSAREGVRRLGSLLEQYGTYEMNGIAFQDQDEIWWLETIGGHHWMARRVPDDVYVVMPNQLGIDRFDFSDALGEQKEYMCSADLEEFVKTYHLDLSQDGEFHPRDAFGSHDDADHVYNTPRAWFMERYLNPHTKVWDEPHADFAPASDDLPWCMVPEKKVTVEDVKYVLSSHFQGTPYDPYAAYGDKSLRGAYRSIGINRNDFLAVIQMRPQMEQENGVIEWLAFASNAFNVLVPFYADVEETPEYLANTTGEVSTENFYWSSRLIAAMADASYRSSVFHIERYQEHVMAKGHELIHHYDALLSKETDAVMRRRLREEANRSIAKMLQKETADTLDKVLYELSGQMKNAYSRSDAMVKIDLITGFLGSGKTTFLKKYAKRLMEQGQNIGILENDFGAVNVDMMLLQELEGEQCELEMISGGCDPETHRRRFRTKLIAMGMCGYERVLVEPSGIYDMDEFFDVLHEEPLDQWYEIGNVIAVVDARLEDTLSPEAEYLLASQAANAGCMILSKCDTATEEQRQNTIAHLKRSLAALGCKQRADQKILCEGAEPLPDQEFAAILSCGYYIASYEKPDFAKGQAFESLYFLDMHLDGDAVTAAVKKMLKDPACGHIFRVKGFLQNPDGTWLEINATQQEITRKPIANGQDVLIVIGENLVEDTIRAYWKGMIYVMMALYQEAHGLIRELELKKNTAYAPFEVFDNESAGIRLVVTGVGEIAAAAATAAVCARDGADAADFLINIGCCAAANAGADSGCEPADRDMDSGYGAAYAAQIGDLYVCHKITEQATGKTFYPDILYRHPWKERELVTGMQPLQRAAAHGALYDMEAAAVYQAGIRFFSPDRMLFLKVVSDFGVAGQERMTAETLTGLLEQHVKEVAAFLTNLREAADEEETLRNDGILQEDETVLERLFAALHCSQTMRASARQYITYAALTGYDWKAELEEWYARGLLPCKDRREGKVRLEELKQVLLMKNLNRSYYNPPFSHIYVEREVAEDPETKRMLAQFPQAEVIVIDHYKDVFCRSRQDYVRQHAAQNLILAAKHGELLYPGAPVCQNFGNEHFYYTSCVMNCVFDCEYCYLKGMYPSANLVVFVNLEDIFAEVEKRLAVHPVYLCVSYDTDLLALEHLTGYAARWIEFVRRVNAGGQRLRIELRTKGTGGSLWQMVRPEAGVICAFTISPQQVIDAYEHGTASLAGRLAGAKAAMEHGFSVRLCFDPMIYCSDWKNHYDAMLAQVCGTLDLEKLSDVSVGTFRISQDYLKKMRKNEPDSAVVQFPYQNDSGVYHYPTALMEEMEQYMTEKLAAYLPAERIFRWKEMEQCRENKAAIVTGASSGIGAAISARLCEMGYEVFGIGRSFGSSFAEQFPDAAGNPLFHAVVCDLLDTEKMLKLVRGIAAEAEVTLLVNNAGSAYYGLHEELNPKKIQEMVRTDMEVPMILSQQLLRGFKKNKGCIVNIASVTAQQSNPHGCAYGAVKAGLASFSRSLFDEARKYGVRVAVVSPDMTKTELYRNADFTVGEETESYLLPQDVADAVAYIVGQREGVAVSEVTLRPQYHRIRRKPVAKKERPVEMKDLTKGKPSTLILAFALPIFLGNLLQLTYSVTDTRIVGSFLGEDALAAVGATTTLSNLIIGFLLGLANGFAIITAQRFGAKDIRGVKKSFAASLVLGTVISVVLTVLGLVFLQPILRFLNVPEHLIPVAGPYIFIIIAGLLATFLYDACAAALRALGDTVTPLVILAVSVALNIAGDLLFVLVLKAGVRGAAAATVLAQILAFVICWLYMLRRYEMLRLVREDFRDADMAMMKNMLGSGLSMGFMSSLVNIGSLTLQTAINKLGQDIIVAHTAARKISEIFMTMFSVFGQTMATYCGQNLGAGRIDRVKKGIRLGIFYTCIWCTLSAVASYTIGSWLVYLVTGSTNEVVILNATSYLKFDTLFYYVTAVICVLRNAMQGLGDHITPLISSSLEMVGKIVIAATLVPMLGYTGVIVAEPLVWFIMVIPLVVQIFRMPVLREENRGNQGKMSSMSSQNIPVPKKQGNSMSVSAEGRYEVEKERMLTPSIFGENLFDDWFDDFPFFDDRDLRKVDKKLYGRRAGNLMKTDIQEMKDGYKMEVDLPGFKKDEIAVELDDGYLTISAAKGLDQDEKEKESGRYIRRERYAGACSRSFYVGEGVTEEDIKAEFKHGILTLVVPKKEAKPAVEQKKYIAIEGMIMSDKNPKHPLKKKKVAAKVNMADHEAVEEAREAYKSKKHVYMEQQELDFHLLATMRPKVYVPRQHPLAGRTKVSMEDLAPYVYSHYFQGIDSSQDRFFSEELVENTVAKKTITLTDEMADASIGMEMNTYTIGSGMSGENLLEKDYAVMNLDTHQRIELGWISRRDHELSNFGKRFLDLLAEKLNSMQLDMALSKAFPMNLVLLIFYLIWTTQFSSIAAFFHSQKTIKDVSLMYVAIAALVFCSLASISEIIRSGLISVDKGQYEAGYASGLTKAQTFFHVIVPQAVRAVIPPLTNDILSLVKGTALVSVIGVSDILTDSINAASAAYSYLEAYVAAAMVFWGIGIVLERLSHYVERKFSKSVKTLAGMAVLEVRNVKKVFGDNVILRGIDLDVQKGDVIVILGPSGSGKTTFLRCLNLLEKPDEGSMVLNGREYNLKNVKNKEKLEIRRNTSFVFQNYNLFVNKTVLSNVTLGLTVGRHMKKEEAEKTGKELLDKVGLAGKYDYYPAQLSGGMQQRVGIARAMAANPEVILFDEPTSALDPELVGEVLNVMKQFAKQGVTMIVVTHEMQFAREVASQVIFMADGVVVEKGTPEKIFDHPKEEATRKFLKRILKEESMQKYVISISRQFGSLGRPIAKKLAELLEIEYYDRDIVEEASKVHNIPLKEASNLEESAKYLFMSFPLGSGTTATQDALFKTESEMIKKLAVKESCIIVGRCADAILEDCDHLIRIFIYAPYEDRIVNCVNDLGMDTKAAKRMIRDVDKARDAYHMRYAGYLPNDMNHMDLMVNSATLGVDMTARLLAEVVRDKFSMEKHRKKLIKNATVFDGHSSGLAQGKKIVIEDDIVTEITADEVSEENFDEVFDGTGMVAMPGMTDAHVHMGCLFAKGEFPVDYATVLTVAKCKDALMAGFTTFRDAGSVSEGLKLAFDEGVLPGPRIYPCGAYISQTCGHGDSEYAHTYRDIQYRHPSSTVLADGVPEIIRAVREQFYRGASHIKLMATEILNRHEDIRLLFGTDMMITGPDYQVEQSEDIRYYEKRFGTMRALRALTGTANEVFALTTYQNPYPKGKIGVLEAGSYADLLLVDGDPTKSVSVLADTDHLRLIMKGGTVYKNTLCMKELLYWIVEWIAKIHSHILRLNDAYEYNFTDKELHFLVIGMMGMGFIFVVYPVFKWLAKHDHVMVIAWIYVLTLIIVITFAIEIGQKVTGTGNMEFADIVMGVFGFIVMFLVFSVVRGIYKLIRNLIRGDRKDEMNEFWKRVLETCVVILGNCLYAFGVAMFIVPGGLITGGTTGIALFVHHMMGCSVSVFVLLFNTVMFLIGFAVFGKKFAANTLVSTFSYPVALELFTRLLHGYAITDDIILCMIFGGICIGGAIGVVIRAGASTGGMDIPPLVLNRYFKIPVSKSIYVFDMLILLLQAFDSTGEQLLYGILLVIVYSVVLDKCLMLGTAKMQIKVVSEKIDEIRKAVLTDIDRGVTMLKSETGYMERETEMLLTVVSIQELAKTEKLIHSVDEDAFVVINRVSEVSGRGFSSKKRYLEKENSMTLQQLRYALTIAGCGSMNEAAKRLFLSQPSLSETVKELEQEIGLQIFMRSNRGIIITPEGEEFLGYARQVIDQYGILKARYVEKQRKEKFSVSMQHYTFAVKAFVETVKKAGMDSYEFAANETTTYDVMENVRNFKSEIGVLYLNDFNEQVLMKIIREKGLEFEELFACDTYVYLWSGHPLAGQSVISMEELDEYPCLSFDQGRNSSLYLAEEMKSTYDYKRLIKANDRATLLNFMIGLNAYTLCSGIICEELNGSDYMAIPLKETEKMRIGYVKRKGASISHIGQIYIEELKKYKEKIMMLCGFSRILQIFGRTDRYRRYGAWVGAAAGLLFLFYVLEITFMPAIAIRHLSKTFEQKGNSVEALRDISLDIEEGDIYGIIGMSGAGKSTLVRCLNYLERPTSGEVIIGGRDLGTLTEKELREQRSDIAMIFQHFNLLMQKSVLDNVCFPMQIAKKKKDEAKKRALELLETVGLADKADAYPAQLSGGQKQRVAIARALATDPKILLCDEATSALDPQTTQSILALLKEINRKFGITIVIITHQMSVIREICSHVAIVEKGSIVEVGLVEEIFNHPKSRVARSLILSDRAADAASYSGAEGDTADGAELTGWSGESRQRDRIGDDKKLRIVFSENSAFEPVIANMVLKFGTPVNILRADTKNVGGVAKGEMILGLPSDAGLQEQMEAYLVEKGLEIEEVTGDVEMWNSQVIIMLLEGIRDTLYMTLASTLFGYIIGLPMGIVLTVTDKDGIRPNAAVYKVLDVISNLLRSIPFIILLIVLIPFTRFVVGRSYGSTATIVPLTIAAAPYIARMVESSLKEVDAGVIEAARSMGASDFQIVTKVMLVEARTSLIVGATISLGTILGYSAMAGTVGGGGLGDIAIRYGYTRWQTDIMVVTVVLLVILFQIFQTIGMKIANRLDRRKMKKKVLSTILAGVLALSAFAGCGSSTEESTDTSAATKEETPVAATEEAVSAENTESTDTAAEGGTIKVAASATPHAEILEEAKKILADEGWDLEIKIFDDYVMPNEVVESGEFDANYFQHIPYLESFNEEKGTHLVNAGGIHYEPFGIYPGTKSDLSELADGDTIAVPNDTTNEARALLLLQDNGIITLKEGAGLEATVNDIAENPHNVKIEELAAEQVARVAPEVAFVVLNGNYALQAGFSVAKDALAYEASDSEAAKTYVNIIAVKEGHENDPGIQALVKVLKSDEIKQYINDTYDGAVIPFEDMQVEIWFKKCGISNQPNVCICDDPCLSKFVALHGLCPQIMRQFKNFRVALLPLLKKTMPGNFTPSLYLLFYHNIQPKETLLLQNIAKEIVAISIDRFGGMKEEQKVSFIHSISAKIMLLTVLAVVMSVLIVAFRAEAGAKKVVGDVSADYILSMAEMGVEIVNNLPQEADAGAYENALADISMEGIDSSYAYLVDTDGTMLYHPTAEKIGQPVENAVVLGVVAELAKGQVPVNETVTYDFKGVTKYAAYAITANRQIVVVTADEDEIMKPLNQIVSKIMLLSLGILAAAIVLAYVVSQFICRPIQQITTIIVDTAQLDFRSNPNGAKLRSRRDETGEMANAVHVMRRNLRSMIGDIDTASNQITQNVDGLQEITTTVDHMCSDNSATSQQLAAGMEETAATTVTINENIEVIKNGADDINSMATEGARTSEAIMMRANDLRTKTVEASTKTMTMYNNVKTKAQEAIEGSKAVDKINELTGTIMEISSQTGLLALNASIEAARAGEAGRGFAVVATEIGSLADQTSKAIKDIGTIVDAVNAAVSNMAECLEETTGFLENTVLTEYKEFEQVSEQYQEDADTFKTSMNDVSDAMAGLANSIDAIAQALSGINSTVGESSIGVSDIAEKTSDMVEKTGTTHDMVEECYTYVEKLREIVSQFVLQMQEYYRGKTEERGKNVLEDEEKKSWAESFLEQLNDPLIFILFVAAAISLLLREYGDMAIILAVVLLNATVGVIQEGKAKKSLEVLKQMTSPHALLLEGDEVRQIPAADLIPGDLVVLEAGCQVPADLVLTEAVNLKIEESALTGESVPVNKDTAQNRMAYMSTNVTYGRGVGRVSAIGMDTEIGKIAGMLKAAKVELTPLQKRLADLGKILGTVSVFLCVLLFGMAILQKRDVGEMLITAISLAVAAVPEGLPAIVTMVLALSVSRMVKVNAIVKRLPSVETLGCVSVVCSDKTGTLTQNRMTVKKCYVNGRVHAVKELHPAGDRYFLQGFSLCNDASLHGGERRGDPTELALLDMAAAFGIQRETLEDTMPRIDEIAFDSERKRMTTLHETLDGRISFTKGSPDEILERCRYVWSNGKTAAFSAAAREQAKRGLAEMTEAGLRVLAIGMHPKAAQMEESGLTFLGMAGMEDPVRPEAAEAVEQFARAGVRTIMITGDRADTALAIARQLGIAERRDECVTGEEMERMDEQMLAARISRTRVFAHVSPEHKVRIVSACKKNGEIVAMTGDGVNDAPSLKSADVGIAMGMAGTDVARNAADMVLADDNFATIAGAIAQGRSIYENIRKSVLFLLSSNFGEIITMLAAVAMGLASPLKSSHILWINLITDSLPALALGVDVEEQKDYMNRPPRRRDESLFAGGGWGCTCFYGLLIAGISMLAFLQEPVGTIKSAGMTLTIPHLQAVLKDAQVLARSQTYAFTVLGMAQLFHAIGMRDVETSVFCMNHLENRLMLAAFAVGISLQMMVTEVPYFVQLFGTCRLTALEWTKLLGLAAMPLLAHELLVLFSCAGEVKDALRLQGEDMKEWYQISTEDVKKKMETSEHGLTTEEAAKRLAQYGENVLVEGKKKSVFAVFFGQFADLLVGILIVAAAISACSGNPESTFVILVVIVLNALLGTVQYVKAEKSLESLKDLTSPNAKVLRSGVKVEIPAKEVVPGDLLLLEAGDMVAADGRIRRSYSLQVNESSLTGESTNVEKREGVIEQEAALGDRVNMVYSGSLVTYGRAEVFVTETAMNTEIGKIAGLLSNAKEKKTPLQIALDDFGKKLSYLILAVCALVFGLSMYRDMPLLDAMMFAVALAVAAIPEALGSIVTIVQAMGTQKMAREHAIIKDLKAVESLGCVSVICSDKTGTLTQNKMTVQKIYLDHTAIMPEALQINDQLHRYLMYDAILNNDARMDDGKVIGDPTESALLKMVRKCGVDDDFLRGAMERQQELPFDSDRKLMSTVYALHGVPTLLTKGAPDVLLKRAVYLREKQGIRRMTEEDRTEILEQNQRFSGEGLRVLAFAYRELKESEELTLSGECDYIFLGLVAMIDPPRAESAAAVADAKRAGIRPVMITGDHKVTATAIAKQIGIFGEGDIALVGPELDAMPDKELDHLIGHIAVFARVSPENKIRIVEAWQRRGSVVAMTGDGVNDAPALKAADIGVAMGITGTEVSKDAADMILTDDNFATIIKAVANGRNVYKNIKNAILFLLSGNMAGILAVLYTSLAALPVPFQPVHLLFINLLTDSLPALAIGMEPAERDVLSEKPRNPKGGILERRFMALLLGQGALIAVCTMISFEVGLKESAALASTMAFATLTLARLFHGFNCRSRHSIVKIGFRRNWYSLGAFALGVLLLALVLFVPALKPLFEVETMNGMQLGCVGVMAVLPTFVIQNFKVVREVFDREKMRRRGKRELAALLAVALLAGSAACGADAGEKDAAIGTAEAAAGQDTETAAGQGTDAQAGAQENLEETALSLMREVNPAEAAGTDDLYRSWYEVFVYSFYDGDGDGIGDLPGLTEKLDYINDGNPATDTDLGCDGIWLMPVMPATTYHKYDVTDYCAIDEQYGTMEDFETFVNACHERGIRVMIDFVMNHTSSQHPWFQTAAEYLKDLPEGMEPDTEACPYVDYYHFSREKGSGYCQLAGTDWYYEAQFWSEMPDLNLESEAVRQEFDEITDFWLEKGIDGFRLDAAKEYETGSIDSNIEILSWFNNMVKEKKSDAYIVAEVWSDLETYAQYYQSGIDSSFDFTFADKDGVIAKAVKGTSGASSYGKAIVRLQDALGTYSDSYIDAPFYTNHDMGRGAGYYSGDTMEAQTKLAQAMNLLMSGSSFLYYGEELGMKGAGKDENKRAPMYWSKDAGAEGMCLGPQDMDAITMIYDSLAEQQDDGNSIYWYVKEALRLRNAYPEISHGTAEFLENLSDDAVCVLRKNWQDSSVIVVFNCTKDERTVDLSQISADSESGDLKLAGELLTGTRAASWQDGTLTLPAYGVAILKMEKKADFHSLSRKAKVQYVWDYYKWPIAAAIAALCFVIYLIYHYATYRDPLLNVIMMNCNDSITADSKGFDEFLEACGYDPKEDSVSLTSSLQFSDGEYSTSYNDTQVLTLMLAAGGQDLFFGTGDEYLDYADQGALMDLSTVLSDELLDRYQDHLIYTTEDGAVASYPCAIELTDNAWLHKYNYYDSCYFGILYQNQNLDAALQFADFLLNYNDMHEKLVIVPRKKSTVKKILNVVWFVLACLCFLFAMWVPILFAVPAIIFAIIWYFQAFRSDIEYEYTYYDGEFRFARIKAKRKRKGLGRVQMEDVLALAPKGDRSVYKYENDNSLACKDLTSGESGTKIYELVFKGEKGINRYEFEPDEEMLDAVMVKYPRAVIKMEQPQDLFGNYKYCEECKRPLPLTYKENLCPSCIEQKLFREVKEYIRENDVNEYDVAQHFHIPHMQVKKWIREGRIEYKDDHLNTITMHCTRCGAPIAFGTLCAKCMRQKDVSIHSSAREDISDSRMRFIEDMKLFHLSDLHIGKQLHHYNLAAEQRKTLAQIVALAKSEHPDAILIAGDIYDTPVPSAEAVSVFDAFLSALCEIEPQIAVMIIAGNHDSARRIDFASSILAKHEVYITGLPPMQEGETIRRVTLADGYGEVDFYLLPFVKPGYVRKLFDEEIKGYDMAVRRLIEREEIDPARRCVILSHQFYTAGGKEPATCDSEIHYVGGVENVDAGVLAPFDYAALGHIHRAQHIGAEKYRYCGAPFPYSISEAGEEKSVTVVELGEKGQPPVIRQIPLPPVREVKKLTGTLHEILEQAGEEVCHAFVSITLTDDVEAFQPKERLEEKYDHILEIRIDNARTRKLLSDTEEQLAEVRPEEAFAMFFSEMNGREMTPEERELMRQVIAQEMEGDEMKPEKLILSAFGSYAGRTEIDFTAQTGGLFLITGDTGAGKTTIFDAITYALYGEASGGGKSGAMMRSQYAKSVTETYVEFFFLYAGEAYRVRRNPEYKIVKELKNGKLREQKVPAGVELTLPDGTVYPEKRSQTDAKIEELIGLSKEQFTQTAMIAQGDFLKLLYAKSDDRKKIFSKLFHTDAYWRIQENLKRRSFEMDRVLAENERAAEQERARVILPREELKELPLPEAVEQIGTWEKELTASQETVREEIRRLTAAISKAKEVNELFEGLRACEQQVQKLKEEEPVEARRKEQLEAAVRAERVHVKELRCNERLDERRQSDETVERMKSLIAEEKEAHGRQEQDFNTLKMQSADAAEADAEKMLRIREQLPVYERLGEAVEREQQAKQAYESAKQYYERAVREGASRLLAEKNRQLLLEEKYVSAAKAWERASARSTEASAEYERVYQLFLKEQAGILAQNLREAEPCPVCGSLTHPHPASLAENAISEAAVKAAKEQREQAETARDTAYQEFDRQKSAAAEQELRLEQAKQQFLALAGDACGDGEKELYTFAALQAAEEPAAKKRSLTERGRQAERFSREGKKHPGETGEAVDRLKLESLKRDWEEGQRETARIRAELSYETKERAKEALQQLTDEADRRTKRLADAEETLQKKKEDISRQEGMLTQEQTKNAGFVQECLELEKEYRQALRDAGFSSEEAYHEAFLTESGRETLVQQSEAYVRNRVESEGRLLTMQKLTEGKQEIGILAWETELEAQKQRQQELHEEILAMHTAYETDAKVVERCREYFAAHERLDAENQVLKRLYCTADGRLAGSAKIDFETYVQRRYFRQVIYEANRRLLTMSGHQFMLKLKETENSGRKSNEGLDLSVYSLVTDSERDIRTLSGGESFLAALAMALGLSDIAIRKAGAVHLDMMFIDEGFGTLDAQSRKQAIEVLSQLAGSERLVGIISHVTELKEQIEHRLYVTRTENGSEAVWEEMEKYENRQECPIGVFDSGVGGISVLRELVAQMPNENYIFFGDSKNAPYGTKTLEEVQKLTCADAEYLLSRGVKALVVACNTATSAAIRILREKYADMPVIGIEPALKPAVHAGGHPRVLVMATPMTLREEKFHALMQRFESDAEILRLPCPGLVEYVEQGVLEGAELEAFLANLFEPYQSHPVDCVVLGCTHYPFVRETIQKLLGAGVQIFDGGAGTARETERRLKDCGLCSGRAQQGTVELCNSLASEQMKQLEIRLLQSGTVQAIIKKMESYSFLLFLAIIMISTKILGLFTRKIHMPAVVGALVAGVILGPSCLNLITLTGDTGVFLEQMAELGVILLMFNAGLETDLSELKKNGVASFVTALIGVIVPLIGGFLGYAFFFHTDFSDYDEVLKAVFVGVVLTATSVSITVETLREMGKLKGKVGTTILGAAVIDDIIGIIVLTIVTSLKDTSVSPITVVLKIVLYFVFIAVLIFVLTKLKVFVEEQDEKRRTAIICVALCFILSYISEEYFGIADITGAYFAGLMLCTMKVGPYVARRCEIPSYLIFSPVFFASVGLKVTLGGMDASIWIFAIILLVIAILSKVVGCGLGAKICGCTGKEAFQVGIGMISRGEVALIVAQKGYASGMLDDVLFAPIVLVVIVTTLITPILLKLVMKDNDSEKAAAMLLLQKTVRIDTEKRNEEIAMLQDLQEISDGKIYGCNDMVRAACGDCAGCHACCEKMGTSIVLDPCDIWRLTTVTGKNFEQLLADTIELQVVDGVILPNLRMDGEKEQCVFLNEQGRCRIHAMRPGLCRVFPLGRIYEEDRIRYFLQMDACQKPGRSKVKVGKWLDTPQMERYERFLLDWHGLRKQLEKQMKDGIGEQEAKTINMFLLNLFFIKPYEPEQDFYEQYEERRAMAGQAGLKMIIDRGLDQKGTDENIGTSRVNLTQRYVESVKYNGLGDFTEELREEADYRKRIEKIFSEIHMTGETYADLQPEALMEAYWQGEEMISRYYWAKRRDTDDIIWVRVDVRIVPQLDTGDLFAFYNNWDVTHEKNRDRMMQLIIEFDYDYVEYICLQNGHFEIMAQEKSSMCPSARGTDYDADIRDYLTRVAVTDQLEAHIRAMQTEEIRRNLEAEPLYIQEIDVRESDGSVRRKMIRYTYMDKQMGTVFKSCVDIEDIVTEEKKKQERLERAIEETERANCAKSEFLAHMSHDIRTPMNAIIGMTSVARQECQDEMICGYLDKIKSSSEFLLGLINDMLDISRIESGNLNLKSEQMSREMFGTAINTTIGPLMEQKNITFRCDLQHMEEMIYTDAVRFKQIFFNLLSNAAKYTPEGGNVWLLTERLRTEGNVEWVRFTVRDSGIGMSEEFLEHAFEPFSQEGNRTLALQWQGTGLGLAIVKKLVVMMHGTIEIHSKLGEGTGVILDLPLTISGVDAPEKMPQAVMAKQNLEGRRVLLAEDNEINTFVARRILESKGIIVEHAENGKRAVEMVEQNPEGYFDAIVMDIRMPVMSGLEAARQIRAMSRTDAQTVPIIAMTANAYEEDVSQSLAAGMNAHLAKPIEPQVILDTLAGYIGSKNMKHLRQFLIILLFSFLGEGLKALLPLPVPASIYGLVLLFAALELGIIKLSAVEDAGKFLIEIMPVMFIPAGAGLVESWSALKPICVQVVVIMFVSTIVVMVISGRVTQFVIRRNRKAMKEFLNQSVFFGVAISVLTYELGVFLKKKLKWPICNPLLISIVAVIVFLAAFDIPYESYNAGAKYLSYLLTPATVCLAIPLYEQVELLKKHSKAIVLGLISGVITSLVCVLVLALLFHFDHAQYVTLLPKSITTAIGMGISEELGGYVTITVAVIIITGVIGNMLAETVCRIFKIEEPVAKGIAIGASSHAVGTVKAMEIGEIEGAMSSLAIAVAGLLTVVLAPVFAGIMMYCQNRMVHTVQEGDSLYRLARQYHTTVTELILGNPGVNPYNLQVGMKLYVCPGESYVPPQGGSANTGNTGNSGSTGNTGNAGNGGNTSNAGVGGNIGIGVVIPGGQRPGGNQTAGERQNSVNQLFETMRLAWLELIYWTRMYMMSVDSGADAKEQYAVEGRLLETADAITDVFAERLPVAVTRQLRNLLVEHVEMTGQIIRTLKSGDKENYEQQIREWYANANQIATLLTDQNPYFAGKETRNLLLNYLDMTREIIEHQMNGEYDQSIDTFRDLSDLVLELADYLARGLLARMCFANGRCLLCIAFLVLFAALLILAVVHRVRAKKKVLALTPGERVRLLNELAEPFGFAYLPSEDIFTSRLDAWQRDKGYEAKYDTMAVGAGMVIDAFPVYFNYEGRTWLVEFWKGQYGINTGGEVGIYHAKGVIPPHAYHTAHFEAVSDAELPRICSCLDTAEETFYEICARHWWLTGFRMGVYTKPSRLRLATTLIFPEQEMALAFWEGLRKTGKPRSLFRICGREVSVRMNFSEEHGLIPGIYRSAVLLWNRLLCRGFRIVTYPWKRTADRMVFLYYLLPGWFRKILVLSGGRCKPRRRNRKPHRSCRGRMEHALHLSLGTGSRYVVISDCHRGEGTTNDNFLKNAYLYEAAMEHYIKRGFFYLELGDGEELWENRCMDRIVHYHETVYEMFACLQSRNALCRIYGNHNMELRKILPEAIILDNCEGGRDVCMIHGHQADFFNSVCWRLSRALVRYVWKPLERSGVNDPTSAARNYKKAVRYEQCLAGWTRLHDRYLIAGHSHRPRLPENGELYLNAGSCVHPGCITAIELEQMQMTLVKWKVATRPDMTMYVVREKLAGPVAILMIKVVKFGGSSLASAEQFAKVGKIIQADKERRYVVPSAPGKRNAKDTKVTDMLYACYALVEAEEDFRVPLMKIKDRYDTIINGLNLKLSLEEEFKKISENFKNKAGVDYAASRGEYLNGIIMANYLGYEFVDAAEVISFEEDGTFDAEKTNKVLAERLEKCERAVIPGFYGALPDGTIKTFSRGGSDITGSIVARAVHATCYENWTDVSGFLIADPRIIKDPQPIKTITYRELRELSYMGASVLHEDAVFPVRKAGIPINIRNTNAPDDEGTWIVESTCHQSKYTITGIAGKKGFVSVNIDKDMMNSEVGFGRKVLSAFEENNISFEHMPSGIDTMTIFVHQPEFEGKEQAVISAIHRLAKPDSIELEGDLALIAVVGRGMKSTRGTAGRIFSALAHANINVKMIDQGSSELNIIIGVSNADFEPAIRAIYDIFVETQLMIAAAVTVFLCVLTLFEFVALKMEWNVPALAVLSGDNGLWTREYQREELVMDGSTENILLADDGETPLTGSGENAKTNVGENGSGGTAQTGENAGNGEDLQVEGTEAVRQEETETPDVSGTGKAEADVKETQTPEFSYYIRINRKQNCVTIYTQDEEGEYTVPYKAMVCSTGLYNATPRGTYQISTKYLWRELYGGVYGQYATRIHGGILFHSVPYYKRAKDTLCTDKYNKLGQQASMGCVRLTVEDAKWIAENCPEGTTVEIYDGEDPGPLGKPEAQKLDKSDPDCHWDPTDPDEENPWQQTETSVTESEQEKQIKMKRALFCHSEAFTCILRKIYIISIASIFSEYFCVYSLFIVFKYFLLMNRQTILLISDMRQVYLAEIMTKRGLNVRCLDIRNSGTVKEQLEKLKSFLAEADMLILPIPVTKIPEQKMLNDILNKNLTNDTLVLGGCFSTEQQELLERRDIHYLDFMKDEIVTEENAVATAEGVIAELVNHSPYNIEEAKIIVTGYGCCGRAVAARLKALGARVTVLARRREVRKFAKKDGFYAADFAFGPEEAMGAAMLVNTVPAPVVTGAIIHELPRDAYILDIASKPGGTDFACARECGIRADLALGLPGKYAPKESAYILDRAVERFVRKEHEMMDFSNYNIGLGITGSFCTFAKARKEIQRLCDMGANVVPVFSFNAQTCDTRFGSAKDYVDGICEITGNEGIRTICAAEPIGPNNFLDIMVIAPCTGNTAAKLCNGITDTPVLMATKAHMRNGKPLVIAISTNDALGASFKNIGMLMNMKNIYFVPFGQDNCKSKPNSMIAKMELLPDTIEAALAGKQIQPILQTPTMTYTYKTRGTCSTQIDLELEGNIVHNVKFTGGCNGNLQAIPKLVEGLTVEQVEEKIGGISCNGRPTSCGDQLAKACREAYEASKQAMSAITKIFGTHSERELKRIYPLVDKVESYREAMGALSDEELKNKTKEYKERLENGETLDDLLPEAYATVREAAKRVLGMEHYRVQIIGGIILHQGRIAEMKTGEGKTLVSTLPAYLNALEGKGVCIVTVNDYLAKRDSEWMGQVHEFLGLKVGVVLNEMTNDERRDAYNCDITYVTNNELGFDYLRDNMVIYKEQLVQRGLHFAIIDEVDSVLIDEARTPLIISGQSGKSTRLYEACDILACQMKRGEDMPEYSKMDAIMGVEQEETGDFIVNEKDKVVSLTQDGVKKVEQFFKIENLADPENLEIQHNIILALRAHNLMFRDQDYVVKDDQVMIVDEFTGRIMPGRRYSDGLHQAIEAKEHVKVKRESKTLATITFQNFFNKFEKKAGMTGTALTEEKEFRDIYGMDVVEIPTNRPIARIDHHDVVYKTKNEKYKAVVEEVVKSHEKGQPVLVGTINIDTSELISGMLKREGIPHTVLNAKFHEKEAEIVAGAGQHGAVTIATNMAGRGTDIKLDDESKAAGGLKIIGTERHESRRIDNQLRGRSGRQGDPGESQFFISLEDDLMRLFGSEKLMDIFNALGVPEGEQIQHKMLTSAIEKAQKKIEGNNFGIRKNLLEYDQVMNDQREIIYKERRRVLDGENMRDAIFKMITDRVENCVDTCISSDIPKEEWDLNELNQLILSMIPMQAVTPEDVDSVKNNKELKHLLKERAVKLYEAKETEFPEPEQFRELERVVLLKVIDRKWMDHIDDMDQLRQGIGLQSYGQRDPLVEYKMAGFDMFDEMTASIQEDTIRLLYHVKIEQKVEREQVAKVTGTNKDESATNTPKKRAAAKVYPNDPCPCGSGKKYKQCCGRNAAQMPGMLFLHIFICMQKNTYRVHFWVAISRNLIYNSYQTGRIMYNVRKVTEDIVWVGASDRRLALFENIFPIPRGVSYNSYVLLDEKTVLLDTVDASVAGQFFENLEHVLDGRKLDYLIVNHMEPDHCAMIGDLVRRYPEVQVVGNTKTFGMIKQFFGTDFAERAVTVKEGDTLVTGAHTLHFVMAPMVHWPEVMVTYDEKDKVLFAADGFGTFGALNGIIFADEVDFDRDWLDDARRYYTNIVGKYGASVQALLKKASGLDIAVICPLHGPIWRENLGYILEKYQKWSTYEAEDQAVVILYATMYGNTASAADALAGRLAAKGVKKIAVYDVSNTHVSELISEIFRASHVVFAAPTYNGGIYPVMENLLADMKALAVQNKTVALMENGTWAPTTAKQMREKLAELKNVTILDAQITIKSAMAPEQEGQLEALADAIVASMDKQMYEVDGCLFLLYKKMHSVERTLFITKANICLQLKKDVIMRQTDMRHVNALASPGNRRFPGLLPERNMNVIFLRGLSLGMWTIQRMDEMDDGDEERLPGEPMMTAVTLESDLGEILQFQMPHNWLLMQGLQEGEEWPEDIEEEDSEALKAREQAAWMENYYHALQELEGEEEQCKHGAEGMGQRDKSEFVERFLELSLFYGLSSPLNSEMIQNVTQDVLSGAIRLESDGDSEAADPEAPEDETDAGMNEEATDPEAENEADEAVEADPELEAADNETDPEADQRAYASVNTGWVTEEEKENFNPVYLAGDQLTVAELVDRLGVTDQNGANITLYASWDDCPWIVAVNLYYTLSQAQQGFITDSEILSHATASDREDGSPIEPGFHENGTSFSIPDYQAADFTQFRHAGSCTENLTVVDSAGSMYYKQITVYVVDTAAVDVKPDGTTRMGRDLKKSVPARFRTANRRRESFEAKWEHFFYAAFGIGFRVFPRFDNPRKMSDNRRQWADFLDLLRDVNTIFDFFAMREVINFNTKWAFTKEATEVPKEMPEKWYWVTLPHSWNEIDGQDGGNDYYRGTCYYAKQLKKSELPEADCYYLELRGANASADVYVNGKAVAHHDGGYSTWRVDITKELTEEENLIVIAVENGVNDRVYPQNADFTFYGGLYRDVNIIAVNKSHFDLDYYGGPGIKVTPEIKGADASVEVEVFLTNAAADQKLVYTVKDAEGKEVAKTETAAGETKAVLSIPAVHLWNGKKDPYLYTAEVALVSGEETVDAVSTRFGCRTFEIDPERGFILNGEEYPLRGVSRHQDRWGIGNALLPEHHREDIDLICELGATTIRLAHYQHDQYFYDLCDERGLVIWAEIPYISSHMPNGRENTISQMKELVVQNYNHPSIVVWGLSNEITMAGSSDEDLLENHRILNDMVHEMDHTRLTTIAVVSMCDIHDPYIQIPDVISYNHYFGWYGGDVSMNGPWMDNFHKEFPNIPLGMSEYGCEALNWHTSDPKQGDYTEEYQAYYHEEMIKQLFTRKYIWATHVWNMFDFGADARNEGGENGQNHKGLVTFDRKYKKDSFYAYKAWLSDEPFVHLCGKRYVDRVEDTTKVTVYSNLPEVELFVNGKSAGKLQAEDHFFHFEVPNVGESTLVAVAGEYKDESHIRKVDTFNEEYSLKESGAILNWFDITEPEGYYSLNDRLSDIMKSEEGKALFMGLMSKVAAGMSQGNEKNDGNPAAAMANPKMLEMLGGFTVIRMINLLGAAGPKVEWKKEDLLGLNAQLNKIKRVDMNHTTDWGRRRRNTGYITFFLSGICAISSGIIVSILQGKYEFDYGMTGTMLGLMSIGNMAASFAAGILPQKIGVKNTVLLLCSGYFLGYFLMAVTGMPAVLMAAFLLVGFAKGGALNNCTILVKDNSADRTRGMNILHACYASGALLCPFLAASLLEINDTLPMVGVAVTGLLLWMIFLTAGLPGAVKEKNGERGKISFAFLKDSKFWLITGLLFCQNAAETSVTGWLVTYYKDMGILSGSFAAYTVTVMWGATLIARLLIAFVFPVHHIFRTLAWMGGCCSVLYCGLVYMQQPAGAIAMLFAFAFAMAGVNPIAVAGAGREMNATSLGVMLPVAGIGAIVMPWLIGVIADRVGLVTGMFCNLIPCVGILVFSVLILKYQAKNMEDTKKSEMWGKVMAPLAGFLAIVLVAFLIILKLLESGVIGTVMAMILICVIVAAVFGGIFMVIKSILDQIRSVINGKVSENTKVAEKAKKLADREDGIGEMVRSIETSVSSIELVLGGIRKAVDELEGVSGDFQQIFSEMSESMDQTADAVDTITGNTVSQASETADMKEKVDAISVSIDHISSNIEDLTKSAQAMREYNRSAEQIMQELIAISEESGVAIENVRKQTDLTNQSAQQIRTATEIIAGISSQTNLLALNASIEAARAGEHGKGFAVVAEEIRTLADQSRESTEQINHVVNVLLDNSSNSVQITEQVSEAFSRQNEKIHDTEEIFKSLNREIEQVGDAIGGIGTEVGDLENHKSVIENGVTSLTASADENAKSAEVTTDNMGRLRGVVKECDGVKAHIVSVSDELIGYIRKFSDGSILDKFGAGKNRMNQEERRQRRQKDTKSAVIVCVIVVLILLVLVAGGVFLVGRLLPKGDGQNAGADGTELPGENVAATEEVTEQPQTEVQTDPVEEQAAQLVSQMTLEDKIAQMFVITPNALTGYASGVTAAGDTTKEAYQSRPVGGIVYMADNLTDPEQTTTMLSNMQEIARERTGLPVFLCVDEEGGSVARIAGNDAFGVTNVGNMSDIGASGDVQNAYNAGSTIGSYLAALGFNVDFAPVADVLTNPDNQVIGQRSFGSDAQTVAGMVTSELQGLSAAGVYGTVKHFPGHGGTSGDSHDGAVSTDKTLEELMAEELVPFQSAVDGGVNFVMVGHISAPNVTGDNAPATLSKVMITDVLRGQMGYNGIVITDAMNMEAVAGFYNSDKAAVLAVTAGADMILMPADYNTAYTGILNAVNDGTITEERINESVTRIVKAKLAMGQPMFREDFVWGVASSAYQVEGTDAADGRGACVWDMFAADGRVFEHQNADTSCDHMHHYKEDIALMKHLGIRAYRFSLNWARILPEGTGRVNEKAIAMYRDMILTMKENGITPYLTLFHWEFPQALYERGGWQNPDVVQWFGEYAKVVAENFSDICEYFITINEPQCVVGLGHLSGVHAPGVKLPVAQTFLVAHHLLMAHGQAVINLRRYAVRPVKIGFAPTGGVAYPYTDRPEDIEAAKKVYFGFYNPIDNWTWNVSWFSDPVFLGHYPEEGLKKFAPYLPEITQEDMELIYQPLDFMGQNIYNGYYVRAGADGEPEFVDRAPGFPKTGSDWPVTPEAFYYGIKFLTERYPLPLYITENGMSCHDLVSSDGRVHDPNRITFLDSYIGAMQKAYDEGANVAGYFLWTFLDNFEWADGYKQRFGIVYVDFASQRRIVKDSAFWYQKIIETNGRMLTMNQTTKEILFLDPVCTHNIWGGTRLRTEFGYPVEGDDIGECWGISAHPNGDGSIRNGVYAGMKLSKVWEEHPEVFGKLAYDRFPLLTKIIDAKADLSIQVHPDDAYAKEHENGSFGKTECWYIMDAPENATLVIGHNAKTKEELASMIHEGRWSEFIREIPVKKGDFIQIDPGTVHAIKGGLLILETQQNSDITYRVYDYDRLQNGRPRELHIEKSIDVIAVPAKSVEDSVTSAIGLPENRLNELYACGYYQIYKLDVNGTCSFAQNHPFLLMSVLEGSGIVNGQPVKKGDHFILPCGFGDVEMQGEMSLVVSTVPVQAMNMQIDLEKGIANVGDVSRMKEVMARAKRGERLVIGFIGGSITQGSLSSTPQTCYAYRVYTWWKETFPQAEFVYCNAGIGGTTSEFGAARVGTDLLAERPDFVIVEFSVNDESTEHFRETYEGLVRKILGAAWNPAVLLVHNVFYHNGANAQVMHAAIGRHYDLPSVSMQSSIYPEVVAGRIENRAITPDDLHPNDEGHALVASVITYFLEQVRSGKLTGSNTSFAPGAKLPAPLTKNAYEDSVRIRNAAAPDMAGLPQPLMEGFVPDEAAQNGITDCFRYGWTAEKTGDAITFLVEGSCIAVQYRKSVKLPAPVALAVVDDDTEHAVRLDANFDETWGDKLELATLLEHGKEGRHTVTIRLAETHEDDAVPFYLVSVIAAGRRGRDMTVKKMVRNIEPDDPMLQYSGRIDDDDPKAPVLIYAASWVKMIFTGTSVAVTLANHHAYWTNEMGYLLDGVQGRIRLLNDEKKKTYEIAGQLPDARHELLLFKRMDACHTVTFYGFTVDDGADLLPPEPKPARRMEVFGDSVSCGEVSEAVDYVGKEDPVHDGQYSNSWYSYAWMTARKLGAELHDTSQGGIALLDGTGWFGAPTYYGVESCYDKLEYNPDLGEVKKWNFSRYTPQVVVVAIGQNDNHPVDYMAEDPGCSAAERWRKRYREFIETLMKHYPKAQIILATTILKHHPNWDTAIETVCGQIASERVHHFLYRRNGSGTPGHIRIPEAEEMSEELASYIRSLGDEIWDVMSKYKMISPKVPNVPWQERPAELNGAPVWRYKENPIIGRNPVKGVARIFNSAVMPYGDEFIGVFRGEQTNGIPYIYLGRSKDAIHWNFEENKINFVDENGESFMPVYAYDPRLVKVEDTYYIIWCQDFYGAAIGMAKTTDFKTFTRIENPFLPFNRNAVLFPRKIGGNFMLLSRPSDSGHTPFGDIFISESPDLTYWGKHRHVMGKGSEWWESLKIGGGAAPIETSEGWLLFYHGVSGTCNGYVYSIGGAILDIDNPSIVKYRCETFLLTPEEWYEERGFVPNVCFPCATIHDSESGKIAIYYGAADSYVGLAFTELDDIIDYIKEHSVVTTTDTEIGKRMLHERYYIEKEKQEKLLARKNEKSDFYNGVFDRYEYPVLTREHIPLTWRYDLNPDTNPYFMERLGINAVMNSGAIELNGKYYLVARIEGNDRKSFFGVAESDNGIDGFRFWDYPILLPDTCPEETNVYDMRLTKHEDGYIYGVFCSESKDTSVSDLSAAVAAAGIVRTKDLKTWERLPNLVTLRSPQQRNVVLHPEFVDGKYAFYTRPMDDFIETGSGGGIGFGLCEDITHAVIDEEKMTSLRKYHTITEAKNGAGATPIKTEKGWIHIAHGVRNTAAGLRYVIYAFATDLKDPSKVIAEPSGLLIGPRGEERVGDVSNVVFTNGAVVNEKNEVFIYYASSDTRMHVATTTVEKLVDYVFHTPSDPGRSVECVAQRCGLIEKNLAFLKANEMETLESMRGEVKTELLTHIIPFWRALRDDTYGGYYGWLSYDLALDQKAEKGCILNSRITWFFSNAYTAYRKGLFTEEDCRSAGYTGEALLEEAKHGYVFLKEHCIDREYGGIYWSLNYDGTPLDTTKHTYNQAFCIYALSSYYEASHDEEALALAKQLFSLIEEKCTDEVGYLEAFTREFQPESNEKLSENGVLADKTMNTLLHVFEAYTELYRVSRDETVGERLRWIMDVFAEKVYNPAKRRQEVFFDAGYHTILDLHSYGHDIETAWLLDRGVKVLGDEAYEAKIVPITQALATHIYETAFDGHSLANECDRGVVNTHRVWWVQAETVVGFLNACEQMPDHSEYRDAALAEWQFIKEHVIDPRRGSEWYWEVYEDGSPILDRPIVEPWKCPYHNGRMCIEVLGRIKENMKKRRKQYSAGAIIWIIFKYVSLVFFSFVAVIPIISCVITAFKTEEEYKTTNVMTLPQNWFNFDNFVEAFQRANMGRAFVNSVIVMVCVLIGAIIIGTQLAYVLNRFQFPGNGLIRNLFLFAALLPGVAMQVTVYQIMHDLGFINHLYGYIIMMMGTDVISIYIFIQYMENIPVSLDESAIIDGASYWKIYWKIMLPLLKPAIVTACILKGVGVYNEYYSANLYLTKENLKTMAISLYTFTGPLGSQYNLICAGVIISLLPALIVFIVFQKQIYSGITAGAVKGMAATSVKKVENKTARRGFLKWAKSRKGQQTLIILAFTIIPLVLLAAFTYVPFAEMVKFSFYKMKYSTPVDKRVFVGWKNYIEVFRNKDIFASLWLSLYYMVGSVVQLALALFLATILSFKTRGGNLFKGLMFFPYLISGIAIGFIFKYFYTRGFVFDSILGWFGFELDSLPYWLRDQKINNWSLVATSVWRYFGNNMVLFIGAIMSVDSEMYEAAELDGANKFQQFVHIILPSIKTIVTLNVILSITGALSAFEQPFVITGGSNGTATYFINMNNIAHTSQKVGLASAMAVVLLLIIFACTILQKLFFKYVYRNADQDDEVMTREERKRLKQFHKEQRAAKKAAKGAMMKLKKVLAVSLVAAMTLSMAACGSSSSDSSASSDDATTGSVTATESGDGAQAADGDLNYAGIKLGEDYTDITTTIHVFNQRTDMSEDSYPGKNWEAYIADFNEMYPNITVEVETDTNYSDDSLLRLQSGDWGDIMMIPAVDKADLSEYFLPYGTLDEMEGQIKFANTWDYDGLVYGVPSTGNAQGVVYNKRVFTEAGVAETPKTPDEFIAALQAIKDYDSSIIPLYTNYADGWPMEQWDGQIAGTTTGDSTYMNQKLLHTKDPFQDYGDGTHPYALYKVLYDAVADGLTEDDFTTTSWEDSKGMINRGEIATMVLGSWAYSQMVDADSHGEDIGYMPFPITIDGKQYASAGADYSFGINAASDADHQAAAMVFVKWMTEESGFAYNEGGIPIAADDNDYPDAYAEFGDVTFVSDESALEGEEDLLNALNADSGLNINAGGKEKVQEIIEHASNGDMSYDDIMAEWNEKWTQAQEDNGVTAEMQKGPILMEPITIKARLNQAYHFSGAAGNGIRFSDLSDDPAFVFREDTSAVHNRFVPAGGRISYASPVRLTQDALPYLLFLYVESGSGTLTTAGDAVQEPESCQLAPGDLMLLPDQTAYRFSTTHTPFCYHCFYLSTEYFSEYLPFLCADDRIFHTNRTEADDIVWRILPYLSRELLSDEPVSSLHLTAMLSLVLSSLAASRRAASTPSLPAHVAHMKEIFDTDYAHSHSLAALESSLGVSRYRLCHDFSDCIGVPPIQYLNRVRLKAARTLLRTTTLTIREVSAAVGIENTTHFINLFKKDAGITPLQFRQSSLHMAKAVKLADIAGQLGVSTVTVSKALSGQKGVSEELREKIKTLADEMGYKQPSARRREHAVKSYNIGVLIAEHWLDKYDSFYLQMYQQVATRAVAKECFTLMEVVSAQMETACEMPKLVQEQKADGLIIIGRLTGEYLKFLNEKAKIPLLYMDFCDEKTDTDAVISDSYYGAYRMTNYLFDMGHREIAYVGTLLATGSITDRYLGYTKSLMEHGVAVRGDWTIADRDIHTGKIDMDRLLQLPKEMPTAFVCNCDLTASFLIRRLHEHGYRVPEDISVVGYDNYLFPGLCDVAITTYEVDMKEMARQTVHTLIRKMAGEPYRQGICIVEGHMVTKDSVKARKNMGMGAIHYYEKERVFKLDTPHTSYLIGIVDEEKFLGHIYYGAKITDYDVRALMRTGEAPFVPSQNNRDRSSFLDAFPMEYPGHGVGDYRESAISVSDKNGNTAVQPLYREHKIYAGKPGLPGLPATFGSKEECETLEIVLADEVLDLTVTLYYTAFYDVDVITRSVRVTNHAKEPVYLTKVFSTALDLDAEDYRMLTLHGSWARERQIEYRQIGYGKQSVGSCRGESSHQEHPFVALVSANAGQEQGRVYGFHFVYSGNFLAQVEKNQFDSLRVVLGIHPQDFRWELKQDETFTAPEVVMTYSDAGLGRMTRTLHDLYRKHLIRSPYKDRERPVLINNWEATYFDFDTEKLLAIAREAKKSGIEMLVMDDGWFGHRNDDNTSLGDWQVNEQKITGGLKRLVDQVNEIGLKFGIWFEPEMISPDSELYRTHPDWAIALPGRMPCRSRNQYVLDLSRKEVRDYAYECVASILRSANIAYVKWDMNRQLTDLGSGVLPVEKQGELLHRYVLGVYELQERLITEFPELLLENCSGGGARFDPGMLYYSPQIWCSDDTDAIERLKIQEGTALLYPLSAIGAHVSDCPNHTVGRVTPFETRGNVALAGTFGYELDVTKLPEEDRAKIPGQVALYHKYHALMRSGDYYRIASYSQNDSFDCYEVVAKDQSEALITFVQVLGRPNVHSRRIRIPGLDEKKKYRVETTGEVYCGDTLLHAGLNVPAMWGDFQSALIHLSEVPDEQMLIAEYILREKTAMGTMPENPALVETIVTTDMAKAIAAAYNVKLIEVLTGFKYIGEQIKFFEQQHTYHYVFGLEESYGCLAGTYARDKDACVAVMMLCEVASWCKKHGKTLWDAMLDMYEKYGYYREGLETKTLKGIDGAAQIQSMMSEYRTNPPKELGGHQVLAVRDYKEDTRKDLVTGEVTKTGLPTSNVLYYELSDNAWCCVRPSGTEPKIKYYFGVKGTSLADADAKLAALKEDLLKMSXXXXXXXXXXXXXXXXXXXXXXXXXXXXXXXXXXXXXXXXXXXXXXXXXXXXXXXXXCQLQIGNLKGREQRELADDHPVKQIYEKRLNTINRYVKRGKLDDDLAEVMKKLAKDKMLRALSNVAYAKDHYEKEMEQATLMEEAKMKSRMRHDIPFPIHNDYEICHYLKNIWECGWLDEYSDEHFLIKAIENRLTTFVGYTQMLNNEPNLHGVIKAKGIIDNDTFNSNFCMNLSGRLACLESVFGSDHMERFIKDQLSAGKQNYNEDTFFEAVSEVSVLYFYTFRSRWKQALYEPPIGKSKLSKNPEARFIGELSLNGDAQKITINIEVKCPKFPSIENQECKIAIPTVLLSDEGRKEIPAFCKDNGIVYISPRVMKLKDFLNSASSKFSVPQSNEYNLLYINWSYCDFASNSFLEAWSLLTNAINGILTHPNAAQSIGVSPDVFKKITAVIIYTEALEGLMFLDFRNAWQMNGRGQRFRMWVLDEKLRHAETTRESDTLFYVTGMKPNDELTQMAMLDCKSKTDSDRVNSSLIGLELVDLVEKYAEKYMLNDFSWNMTGYIPKYQVNPHGDGIISYVAERIFQLEPEPPAVDSLNEYILSALQEKNLLYFSFFLHHYEPQLNKRIKDFLGVDGGDLYDTDRFIDIKLSCREQMLQKLMDYTPAKGAEYATYIYPFIWDSMLRFRMGEEKWSVSSLTNYKMVRSMAWLYHNTKDAVNQFSKKYNCDLALAEEYLKVVRGIRNQQPFYITDEDGEETGEDIALDDSWNYTDILWNGIQAEKVQRAFEKLNYREQTLLEKRLAICMTCGRVGSWKNRPTFEELAIMFEGSTASGAERAYRKAVDKLTELLVAEGALHAVRLKQKSKTKRKKKIAAAIYEYQADCDGEWGEISFDFENGTAEIVRLADWDTIKTNWFANEAIRYTLSLSPDALKKYMLVPLEPLLISMKPILNIENLTKIYGNVPSQTKALNGITFQVMPGEFLGIMGSSGSGKSTLLNCIATVIQPTGGSIQVEGDTLQSLRGKALAEYRGKKVGYLFQNFELLDNLTGRENILLPTSLHGVSEAESSQRLKQLADYLEITDVLDKFPSKMSGGQRQRVAAARALILHPQMILADEPTGALDSKNARSLMEKLSGLNRDEQATILMVTHDSNAASFCKRILFIQDGVIFHELRRGDESQQEFYGRILKVMAQLGGGSANVLMFSNLIFRNSRRSRKENGLFFSSLVISIIAFYMILSISTQDVMIFLQKMESDAVNRLLLLIPVFYGMTLGILFFLIYFACKYQFERRRHEFGVYLMLGMRRSKLFWMLLAEDLLSSILALLIGLPTAVVLSEIVSLVTAKLVGMGIIGHHFSLSWSAMKWTLAGFLAIKLTALLILSGRISHQEIGTLLSQPANRPKKQMPSVFYGLAAVCASVMLATAYYMAIQGIAWTKVSMMGLTLLLGSAGTMLLFYGMRALIALIVKKGKGNKQLHVFTFRQIQENVIHQSSSMAISSLLILAALCCFGAGVGIAGTNNLSTGHVIDYTFEDYTVEDSAQVLPNIQAALKENGLENQFSELFEMKVGHIRTTEDYENAYSMDAVMESLRSLPQSEDRDVLLNTLGYATDPYLICLSDYNRLLELSGKPVIKLSEDEAAVYIGSDFTTVNRTAMLNGILTEQPETELVGSPIYLTGEVQSVNLIVDRSITLSFALILPDEAFLYHTQGMYDTYVNAVLSEQAMEGNSLMTAYSDLNEKLDKIGIEYESYLQNMGRQLFYTVASIYITLYLAIVFLVVANTIVGVQFLMSQQKTGRRYQTLIRLGATYESLCQSAGKQIAWFMGLPVLVAAVSSLFGVRALFTGILSSRTRGTVPEMLLVSAAMILLLCVIEYIYMRVVKHSSDRYLLTLMQPQREEMKRIAVVEDEVYMREELCNMLQKDGYLVKAITEFEDAARLLAALRPDLVILDLNLPEISGFQICQELKNKTAIPILVLTSRDQVKDELQAFQLGADEYLTKPCRKDRLLARVSNILKRYEGRTNLIEGLDFLLDQQTYTLYIHNTSVVLPKNQGKLLVALLSGGDALVTTEQLCMALWGTTEYIDENALQVNLTRLKKTMSALEMKQRIVAVRGMGYRLEAEVSLMKQLWHMIERYYPWLLLLLGVDCFCAVILWISDIQAFQTLIGLVVLTSILLFSAILFVLNKRENTHMELFRDFLSDPTICNEERLLSAISQKEGESVRFLASVLREYKNESNNMADALRDYEEYVEGWAHEAKTPLSLLTMLLDNRNDEISPSLQAKLDYVRSQLQEDVTQMLYYARLKSSTKDYRFEDVNLNDCLGEVLEDYAPLLEEKQFVILNKLQSETVYTDRRGLQFMLGQIVSNAIKYSSDSPMLTISMIHSETADILSVEDNGIGVKKHDLPYIFQKGFTGDSTDSRKKATGMGLYLVKKMADDLNLHLEAASQWGKGFKIVIFFPKLRSSGGKMKTLISCAYNMDNCCVELKFSDGSMIAIDTIAVENEIADNMYQRSELDYLIYNAPLEYADLILNGDPETYLKTVTEYKPLDSMNTQIIAIANQKGGVGKTTTCANLGIGLAQAGKKVLLIDGDPQGSLTISLGNPQPDKLPFTLSDAMEHILMDEPIHSGEGILHHQEGVDLMPADIQLSGMEVSLVNAMSRETILRQYLDTLKGQYSHILIDCQPSLGMLTVNALAAANRIIIPVQAEYLPAKGLEQLLSTVSKVKRQINPKLQIDGILLTMVDKENGKMKILKCLLMIVTAPVVLVLTLFVWLCTGLIYISSLVRGLLSTVIALLGVAVIITYSPQNGVILLVIAFLISPMGLPLAAIWLLGKVQSLKYAIQDRVYGMLIQFTVENHRSIKNSTVISFAASKDKSFDEYLLRPDEKKALLPVLAIYGANAAGKSNVLHAMMTMKEMVVGNAAKVSKGQKLPWEPFGGTKVPTSFEMVFIFQGVRYTYGFSFDAKKIYKEYLYHWPNGREALIFSRENGVYEFRENVNEQVTLSNRTPDNKLYLVSSNDWNLPQTENAYQWFLEKLTFLMDEEPATSETVAQIVSGDDKKARILKELMLADLGITDVTIKNTSGKIPVITTTHRIINEDGTTEYFQLLMEQESVGTQHFFARIGGWLQALENGALLVVDEIEDSLHPLLTRRLIEMVQDKAVNTKGAQLIFTTHDAMLLDLNFFRRDQIWFAEKNDETCATELYSLASFSPRKGENVRKGYLQGRFGAIPFIGGDAMSKMRKEYDPNKVKRRKRKPIVYIICEGKETETLYFKHFRSRNCLVDIIPIPSKHKAAEHLVKHAKSLISQADYYPKDGDQLWCVFDCDDNKDSELQAAISYAEKHGYKIAYSNPAFEYWYLLHFEKRNGYLKDSATVIDILKNKGYLENYGKSVDVFEELQEHQPEAIQYAKERVERLTRDQVAVICRDSNPVTTVYELVEFLNSKRTMATTRIMPLHVGKGRTESRAISDIIDYVANPQKTDNGRLITGFACDSRTVDAEFLLAKRQCIAATGRVQGRYENMILKKVKITNYRQLQNVELDMQDSLTVLAGPNNSGKTTLISVLKGMFCDKKLSFNYSDIPIQLSSDWLDKILPIFQAVMIKYDRESGVREIITKISNDDKFIADYIMDSFQAQIQVDYNPDNDDIQYFADYLMDLDDTKHSFYFIYTYEPSISSFEKNLTEHYDRMSARFRDINNPQGVEKDTKLYFLKEELLRLYCNAAIEKCYFCNSDYGNANPMEVFAFKKLFNFQNIPAIRELDDSESDSSKGISKRVISLLKDNDTWVEATKKLPDLLMSDIENSGAKNEIKNSSIISLDDTIRDISKTSGGHIGKLQLEMDVSEHDVEEFIQRITRAKYDIDGLLLNEDSQGLGFSNLIYLHMRLEEFYKSIESNKVNVFFIEEPESHMHPQMQNVFIRFLKRYYMDKKIQGLITTHSNEIARMVGLDSLRVIRQTGRSKSELFNLSKFRNSIKGIKVTNIEEESQFLLENFFDWFFEIGYSELIFADRVILYEGDSERLYIRKLIKLPEFSALADSYIAFIQVGGAYAHNYVPILKMLKIKTLIITDLDYNKDAMSMEEVKREDSKSTNATINYCYRLVHADREKDYSPTIKELYDFQVKGESVLYNGLVYLTFQDEKSTARTLEEAMLNKLLKVDVFHAIKRSEWKEKRKINNLTFSIPNNKENEEDSEYSIHRIVEATSNNKTDFMYSVILSGNEKKMLPDYIEKGLLWLAKMAGKIKNNKHLINAPAGSGKTTYIRNELKSICLNNPESRILCITYTNRAADELKKNLEGANITVSTIHSYINDLISPFYSHKEVLDLYWEIYAEKIKNRIKNVTNDENIKKSNQYYIEKYGELTEKAVQENISELSYGETPFTSLYTGKLSHDDLLMFANKLIKRYPILLRKIGDKYNYIFIDEYQDTSAYVLDIFYDAVENRENIQIYLFGDRMQQIYKNYDGSFEERMKKFDTSDQLGTNFRSIGKIVSILNNIYNDASFKQHPTENNIDVVPDIVPQVIISSNAQECIYELQKEFPEILTLYLMNKEKYQEIGAQNLYNAYENMEKYSFGRKYSPTDILSDMSSDNPDILMKFLFLLNNIMSFYANENYGMVISLCKKESKYFDSSQFKIKKHTDKQRIKNKFDKIQVEYEKEGCLIRDIVECLFANGFIPEAVKNDFEESTEYQSVLDIKIIEVKNLARYLNMPHISTQHGVKGESHPSVIFMASDNNSTPNVRMYPFFELWSNLEFSLPQFETLFYSYNRLIEKVEAELGMKISELTAETHNKSEKNKAILVRYSNEVLEKYQGNILFDALCKDDFISYLAKQNVGNAKKIFKITKMEGILTAYKLFYVGCSRARKNLIVVVDAYKVNGFKEAFMNKMKEIGFSVFCKMATTRIMPLHVGKGRTESRAISDIIDYVANPQKTDEYSGQQVYTVRLLGNRLAIMMVFYSKNIQTDNGKLITGYVCDSRTADAEFLLAKRQYIAATGRVRGTDDVIAYHVRQSFHPGEITPEEANRLGVEFAKRFTKGNHAFVVCTRIDKSHIHNYIIWSSVSLEYERKFRNFWGSTKVVRRLSDTICIENELSIVENPKPHGKSYNKWLGDHAKPSHRELLRVAIDNALSQNPADFEELLKLLQEYGCEVSKRGKSYRLKLSGWEKAARMDSLGEGYGLEDLRAVLLGKKAHTPRKKTVTQAEPPKINLLVDIQAKLQARKGAGYARWAKVFNLKQMAQTMNYLSENNLLEYAVLEEKAAAATAHHNDLSAQIKAAEKRMAEIAVLRTHIVNYAKTREVYVAYRKAGYSKKFREKHEEEILLHQAAKNAFDEMGVKKLPKVKELQTEYAKLLEEKKKTYAEYRRSREEMRELLTAKANVDQVLKMEVEQDVEKEKDHGMLEARKKKDMTQQKLSDLSHVSVKQIANIEKGKMNTSYLILRALAKVLHISLDTLINPDVSLEDEGVNQVKMLYSSCPPEMRDTLLHHTQETVKELTELSEKFETKRGKQCLCMDYMTLKEAAEKWGVTPRRVNYYCAAGRISGAVKMATIWLIPKDAEKPIDGRTKQGKVKKYEMSNILLLEDDLSLINGLSFAFKKQGFELNIARTLKEAEELWTDGKYDLLVLDVSLPDGSGFEFCKRVRLTSKVPIIFLTASDEETSIIMGLDIGGDDYITKPFKLGVLVSRINALLRRANSFQAADTELQSNGIKVLLLQGQVFKNGELLDLTAAEYKLLCLFMRNPSMVLTKGQILDKLWDCDGNYIDSSTLTVYMRRLRMKIEDNPSEPQMLLTVRGMGYKWNIIGMKILANKEIKNLFLSLSLVLGVTFLLAEVFLWLSYRRLSLLLLILFLLAGGAVWAVCFVYFNRQNQIMEQAILQINAYLDGDRNARIECDNEGELYRLFHSINSLAAVLNAHADNELREKEFLKNTISDISHQLKTPLAALNIYNGLLQDEDIEVSSVKEFADLSEQELDRIEVLVQSLLKITKLDAGSIAFEKEIQNVADMMQDLELHFAYRAKQEQKEIVLSGADDISLFCDRDWLSEAIGNIVKNALDHTEKGDTIHIKWKALPSAVQITVKDNGCGIHPEDLHHIFKRFYRSRFSKDTQGIGLGLPLAKAIIEAHGGLIEVESELGIGTSFIMNFPIPTKLMNLLEVKNICKTYGNGETAVKALKDVSFSVPKGEYVAIVGESGSGKSTLLNMIGALDTPTSGKVLIDGKDIFSMNDKKLTVFRRRNIGFIFQAFNLVPELTVEQNIIFPVLLDYQKPDKKYLEELLAVLNLKERRNHLPSQLSGGQQQRVAIGRALITRPALILADEPTGNLDTQNSSEVIALLKEASKKYEQTIIMITHNRSIAQTADRVLQVSDGVLTDFGRCREMKSYLSLIPISAKVRKRQNRMTMLCIIISVLLVTMIFSMADMAIRMEKTRVIKEHGNWHIMLKEPSEQQIEQIAQRTDVMTSSRYDGLNFDLSEDYTINGKSCVIVGGDNAILTEIYDNLTEGRYPTKEDEILLSNRSKELLSLKIGEAITVHTPAGDFGYTISGFGGDVTITTDADIVGAFLNWDSFQSLAKAEGSKLAPVCFVRFYENIHIRKVIAELRKTYGFTDETLSENTALLGLTGFSSDSYVMGMYLVAAILFVLVLAAGVFMIAGSLNSRTAERTQFFGMLRCIGASRAQVMHIVKLEALYWCKTAVPIGVIVGIVGTWMLCALLRFGAGAEFVQIPLFGISSVGIISGIVVGVLTVLLSSISPARRAAGVSPVAAVTGNLSENWNTSRPIKQNFLKIEMALGIHHAVSSPKNLLLMTGSFALSIIMILSFSVLIQWVNMALNPLKPWAPDVFYSSPDNLCDIKQSFAKEVESRPYVKRVFGRMYQSLPAEYEGKSGQIDLISYENQQFQWAAEDLIAGDISAVSEGNGVLTVFDKSNSLKVGDTIQLEQTELTVAGVLKDSPFDTSDQPTVICSEKTFKEITGKDAYAVLDVQLSQKATEQNVNELHVLANGHYRFYDRLAQNKDTQNTYFMFCLFVYGFLAVITLITIIHTVNSISMSVSARTNQYGTMRAVGMDSLQIKKMILMETATYTTLGLLAGCGLGLPLHHFLYSQMITNYWGTAWQIPLTSIGEILVLLVFTSLLAPFAPAKRICNMPITATINELMKKINLRELYPDVYTTDFFVDVTEEVMETIRAAERAEAAYERKMYRYKAQYSLDCENGIENAVLLKPQTPEMLLEEKQSQEQVYAAVMKLPEKQAKRIYARYYLGMAVNEIAEVEGVDPSRVRESIRRGLKQLVKYFMDYMTLKEAAEKWGVTPRRVNYYCAAGRIPGAVKMAGVWLIPKNAEKPIDGRTKQGKRLHHEMNKILIIDDDRELCALIKRSVQAENIEADFCNAGKEGLQKLREQEYQLVVLDVMMPGMDGFETLEEIRKENSLPILMFTSKNDSISKVRGLRAGADDYLTKPFDMDELIARIASLIRRYTRFNQQAGAIQKLNFDGLQIDLENRSVTTSNGTFELPPKEFDLLLYCAKHQGKILTKQQIYEEVWGEEYFYDDSNIMAIISRLRKKLEVNPSSPKYIQTVKGIGYRFNKEVMEIIVFLSVVIAVGAVLTSIVLVRRVKKQIAEMTDVLVDVKNGNGNRRILSATNELTAPLAYEINEIVVAYESRLSTVRQTEETNRQLMTSLSHDVRTPLTTLIGYLDAAHKGLVTGKDRDDYIETARRKAHDLKEYIDVLFDWFKLNSNEFALEIQSVEAAELTRNILIDWIPIFEDKQVEYDIDIPEHPVRVRLDMDSYMRIVNNLIQNVIAHSHADKIKIALSKKENNMELLLADNGVGIEKEDLKHIFERLYKCDKGRSEKGSGLGLSIVHQLVEKMGGSITVESLPGEGTEFMLLFPLESMDTNYIIETKNLTKQYGSQKSVADLNIHVKRGRIYGLLGRNGAGKTTTMKMLLGLTKPTSGEVKIWGKSLQGNEKKLLPRIGSLIESPGFYPNLTGTENLRIFATLRGVPNNHAIKDALDLVGLPYKDKKLFSQYSLGMKQRLAIALAVMHDPELLILDEPINGLDPIGIAEVRSFIRELCDARGKTILISSHILSEISLLADDIGIIDHGALLEEESLAELEQKSSKHIRFTLSDTAQAARILERNFHENHFSIQDDHNLRLHNLDLPVGKIVTAFVENGLEVSEVHTCEESLEDYFKHVTGGEGIAMLKLIKCEFLKLKRKKFIPLIILAAFLFPIPLTYLMTTPSMIERYTDRADAFDGLFNMVLGYGIQFLLPCIIGVIAAILFFMERDNDTFKNLRTIPVTSTQMVLAKIIVLFIFGIVFCVASTIATILCGIGTLEVYGIGYKLFLAVETGIFITAGTLPLIVLVVFFSKTYVFSILLCVFYSVLNMSATALFDTLPKTMLWLLPTPLTTFWSAGDMAAHGIKMDLEQMTGLIPSTFQVVFILGIMAFVSFLLIDRLYKQRGEMVRIVKTEFYKLERYHILWAGVALMLLSVLLTLFTSMANDGSVWDFAYLTEQVIKNNMSMIFPMCISLIAGYMISREQTDDTLKNILTVPISFKKLLTGKLIVCGVLSIIFGLICSLFTIIAEMIVGFPGFEISLALKAALQITAVNFFLYLAVLPIIALTCRRAGSFLVGVIIAFVYGYGGMFAAGNMTLANLYPITASLGMVGYRSYDTAVNWNIGTCSCSLALAVVISAILILCMKEREATQTKKKAKKVAPKKGWMKKIVLALTFVLVGSFMLAGCSKDEILNHYNNIVQSAGSIELTGKSSLQGEKEKGIDDYTGTYTADYANFSGTEYLFGGTSIKREAGKELSIDCALEVTEGTAKVFWISGSDEAVTLIEATGTYSDTITLPGGGNYIGIECESFTGSIELNIEMDMIHRNDYGERCQFDAYCKLVLYHEAIDYLREMQRRRDTVSYPYLMAKIEDCPGFETFGADVKEARKAKNLARKDLAEKVNIDTRYLANIENEGTIPSLPVIIQLVKICSLPMERYFNPEVMREESELRQRVGQKLKLYLEQYLPIVEGAIDGALKVEKPNEEAEGVMKILLVDDHILFAKSLSIALCDNPEIEQFSSTKDIQNLEKQIATELPDILLIDINLGGLTDEDGLMLTQHLLERFPDQKIVILSGYNLPVYRKEAKRIGARGFISKDVEPDELLHILLTIKDGATHFPREEVFIEELTDGERKVLELVASGVRRREIAEQLFISERTVSNHLQHIFEKLQVSSTVEMITKAIKLGYIAQSVIMLNQFAVIIYLGFIAYNGHYIESNYLVHFLSLSLLFFDAAYISYKNVKCNKVLNHFSLLLLLLGWQFLLYLFDFRPISKAVSMLLLPVCFYQSAYFIQTFLFQSSAYRGQKALLAFLKISCVTAIICFFFSDRAFFTAYQLQFFISTLALAVVGIMQRKRIVFVLKSQWKRLLFPLALVVIPFVIYLSVFHRESEYMASMGSYIPVMLAFVCIHSIVFQYHPQQVQFLSLSGGYIVALVFVGLVGLVGMAYLFQIPLMAILMSVYIVVLLAQVYNILLYVRICRQPTNYNNPTDRQHFYAYSLEQIKREENLKKDFSNYLHDNILQNLLSIKNMLCKAEQPEIRRLLLDTLTELNASIRFQMQTYHPNLVKSLTLKENIQNLLDSMEENHSANICLDCDKDVFLVEPYNVLIYRMIKELVTNALKHSSATTIDVLLMQEDGRITLKVTDNGIGFKPFTYKSGSHQGLASIGEQVSLLDGTMNIQPATGGGTAVVISMPMNGGDSYENFVGRMKLSAIALKNLKRNFSFYSLYLFSVSFVLMIYFCFTSFSMNQIIMEKISSDGRVETMCRTVAVFIMAFVIFYMFYSNSFFMRRRMRELGIYSLLGYRKSTILKLLIFENVMICFGGMILGILTGSILHKIVIAGIVILLGISVDQRAIPLIYPAAVKAILSFVIVVLITLTLSNASLLRKSTLLDLVRLEKKTEKPIHPHAITAILGVGFLSAGYGLALDIMRGKQSLWNTIGFSPIAMLTLLCVVAGTILFMYSFLPYVCQKIRQKKSRLYHENTIIVVPKFMHRIRSNAKSLILLILLTAGTLAVFGSTVLSMWYPYQSFRRIIPSAIEYRVTNEQEKEISLQALQEACDEQEYEVYETIIFKVKATSDRLPTEYSISEDKGRIPGFECISRTDYATLLSQQGKKADIPELSDTDCILIKYYPDHEHSDMGASYHLDFGTGITDVTVKQTSIDNPIGFSNSVGTLILSDNLYQKMRDSTIDRVSVISINGEKMRSNETAYTALKASMPDNIYLASAWQRESTFVRDASSTFLLICFTTIIFLIATGSILYFQNISSVTYDKPDYEIMLKMGYSHTMIKKCVRRQIQIYYGIPYVIGSLHSIFAMICYKSALMDYLLGRNSAVVAPILLAVAIFSIIYAIYYQLTKRSCYKIALIMSTLLEVKDITKIYPNQPKPGLDHVSFEVMQGEFLGIMGASGSGKTTLLNVLSTIDIPTSGSIRMGGKKIQELSQTQAADFRKNNLGFIFQEYFLLDSLTVQENIAVPLTLLHESAKTIDKKVMELAELFGIASQLKKYPSELSGGQRQRVAAARAMVKRPPLIFADEPTGALDSSSATELLFALSEVNQALGTTILMVTHDPYAASYTDRILYFKDGHIISELKRCNRERREFYEEIMQEAARQDEKRMKKHLKLCVISSIFFALLVYLIWGNTALTVSNIKISSSRIPIAFSGFRIAQVSDLHNAEFGKGNRKLLELLSESKPDIIAITGDLVDAGHTDIGVALDFAKEAVKIAPVYYVTGNHEASLSQYNELKARLETIGVTVLDNDAVQLNHGKEAISLIGLSDPDFTIKGDIFGEVPAMVSTKLNNLADDENSYTILLSHRPELFESYVHCNIDLVLSGHAHGGQFRLPFIGGLIAPNQGLFPQYDAGLYTSGSTNMIVSRGLGNSIIPIRFNNRPEVVVIELLNMDCMEAETDTGRQPGHLRKNGNKKRQISMRENWHAKNSHYYTELHGTIMPMQCYTCPEEGQGFFMKKINLRELYPNVYTTDFFVDVTEEVMETIRAAERAEAAYERKMYRYKAQYSLDCENGIENAVLLKPQTPEMLLEEKQFQEQVYATVMKLPEKQAKRIYARYYLGMTVNEIAEVEGVDPSRVRDSIRRGLKQLVKYFMEKLITRKEAAKILGISIATLDAARNNGLISYVQYVQNGCVYFTSAGLQEYIAKCTHRAKPAEKNATYRKPRRAGVMAKRQTIIPQYGTVMKRGVLYYRTRIKDANGKLVAIYAKTPEELYNKETLALEQIENATFHRKTPTVAEYCEKWLLMQSVHVRATTLTDYTSKVRRHIIAELGDKRMGEVSLDDIQLALVPVSKKSASVYKSVVILYKSIFRAAMESRIIDHNPTIYLTTKGGGVPQEERQALTDEQVECLLDAIRDLPPYVFVMIGLYAGLRREEILVLQWDSVYLDTDTPYLTVRRAWHTEHNRPVISDELKTKAAERNIPLPVCLAECLKAAKETSTSEYVVSNRDGEPLSYTQFKRLWQYIVTRTVKERSYYRYEDGKRVKHTVTPVLGEKAAHNGKVVYSLDFEVTPHQLRHTYITNLIHASVDPKTVQYLADHESSKITMDIYAKVKYNRPDELVRSMNCAFASWDAAQMAKKKTQIPKYGTITLKGIQYYRTRITDADGKELSLYAATCEELYEKQLETRKQVEEIIFHRQHPTVAEYGEKWLLMQSAKVSASTLRGYTRDMTNYIIKPLGEIYMEEVTADDIRLALVPLSKKSEGLYNKVNMLLKCIFYAAERNQILEHNPCAGISGKGGKPTKKKEALTDQQVAVLLDTVKGLPPYLFVMLGLYSGLRREEILALQWDCVFLDEDTPYLSVRRAWSTEHNRPVISTVLKTPAAKRDIPIPKCLVDCLRETKENSISNYVIADSKGEPLAASQFQRVWQYVVARSTKPRNYYKYVNGQSIKYTVTPTLGMTQKNQPKIRYTLDFDVTPHQLRHTYITNLLYAGVDPKTVQYLAGHENSKTTMDIYAKVKYNKPEELFGVVNGAFHQAIAEMTTVNTKSGRIIKVVSREEEKSTLTESDTEMDERAVEAVKAAINKARICKKPIAGYDKEKKRSYVEHANGERKYPEMAREKVQYKRLVMMLGSTVLIACGIFFYLLFSKVKSVICFWQGKMEIIKVMHMSLLLMEQILELFLMILMGFIIVKAGIVTDEDSKVLSKIVLYLIIPCVIINAFQVNYTPETVHGLLIAFIASVMLQILLLIIVSFMGKLFCLNEVEIASIYYSNSGNLIVPIVTFILGQEWVLYGCVFMSVQLIFIWTHCKKIISRETSYDWRKIVLNINMISIALGAVLFFAQIHLPEILNNTLSSVGNMIGPASMIVTGMLFAGMDLKKIFGNKRVYIISSLRMIVIPLIALALIKLSRLAALSSDAPKIMLIVFLAVITPSASTVTQMCQVYGNDAKYASAINVVTTLCAIVTMPLMVLLFTYIKMGIYDYSVERPDGTTQPLSAYEGKVLLIVNTATGCGFTPQYRELEEFYRKYHDQGLEILDIPCNQFAGQTPGTDEEIHEFCTLKYHTEFPQMKKSDVNGEHQIPLYAYLKSQKGFAGFGKGAKAAAMGIMLRKIDKNYKENPDIKWNFTKFLVDRQGTVVVRFEPTGDMRKLEEQILTLLMERVDIAIIGTGPAGVSAAITAKVRNKSVLLIGSRELSEKMSKAHQILNYPGLPEVSGADLVAGYKKQLAGLGIEVTEKRVNAVYAMGDYFGIQVSGEILEASTVILAAGIVMGKPFPGENELLGSGVSYCATCDAQFFRGKEVAVIGYGREAEQEADYLAEIVGKVHYFPMGKEEPQLSDAIEVVHERPKAITGTQTVSALETDAGSHPVDGVFILRDAIAPSQLVPGLATEENHVKVNLQMETNLPGLFACGDITGKPYQYIKAAGQGNVAALSAAEYLDKKKREIMVKKIQNNNMDEALQAKAAVVDFSAVWCGPCQMLAPVLEELADDLDGEVAFYNADTDENTQLAIANGITNIPALLFLKDGKVAGKNVGFMPKPELEAWVKGCMEQMGFDEEHPLATIVESMLERTHLDYKETPDIKWNFTKFLIDRDGNVVERFEPTADMDVVREKIENYLMKDKYDALKLENQLCFPLYACSKEIVRRYKPYLDEIDLTYTQYIAMMVLWEHGRINVKDMGALLYLDSGTLTPVLKKLEQKGYLTRERDHADERVLNVTITEAGEQLKEQAVDIPRKMGGCIGLSGEDARELYRILHKVLALMEQEMIERRNIAVCIVLTLVTCGIYGIYWIVCLTNDVNTVSGDVNGTSGGMVVLLTIVTCGIYGIYWAYKQGEKLDFTKNNRGIPSSNSGVLYLILQIFGFGIIAYALMQNELNKLAMTKKARLKKLLMNIFLLGMAGLLYGIFVSYTGLAIPCLFRKVTGLLCPGCGVTGMCVALLHLNWKGAFFCHPVLFVLLLPLTAVFICSAAGYVQNGRFRFARWQNLILYVSVAALVIFGVVRNLVRFLMKWKKLVTLGCIVVMTVSSVTACGSNTTENQTVEATEQSEENQSDSVIVQVTAVEGDQITADVGTLTTASADASGNGAPGGEAPGGDDSGNGAPGGDAPSGEAPGGDNSGNGAPGEAPSGDAPGGDAPSGEAPGGDDSGNGAPGEAPSGEAPSGDAPGGQMPGGSSFEASGESITFTLTDDTAITLEYLQGSDEGTADDIAVGSVLEVVLDEDNQAVSVTVRNLNAGGGFGGSGEVTNGTSANTITEDTEVDSETYTSTGDDENALRVDGATVTLKDITIEKTAGSSSNTEDGDFYGLNAGLLVLNGATATITGATVNTSVTNGNGVFSYGEGTVVNISDSTIRTTENNSGGIQTTGGGTMNAANLDVETQGNSAAAIRSDRGGGTVKVDGGSYVTNGTGSPAIYCTADISVSDATLTANASEGVVVEGKNSVALTDCEVTGNMSNTYNGDSDENIHCIMIYQSMSGDADVGEATFSAEGGSITAKTGDMFYITNTDCEITLKDVAFTLANDVFLRVEGNSSSRGWGTEGANGGDVTLTADSQEFTGNILVDEISSLALTMKNGTSYEGAINPDGDGGTVDVTLDDNSTWTLTGDSYITSFDGDTSNITANGYHLYVNGEQVLMEMRMDIRFKKCGISNRSDVCIFDDPCLSKFGALRGSCPHPGRQFXXXXALACTPAIKHNRAKPMSELPSAIFLIADGNEFRFARFYIVYEGVQLARLKSPPIVSGVPDMHPSDCPNVEETRNPMQTFNRKKCSHFSPTNIPSAFPHEILKCTYHNITYLVMELLDIVDEKGNPTGETVPREVAHREGIRHRTAHVWIFRRRGGVVQILLQKRSDNKDSDPGCYDISSAGHIPAGSDYIPSAVRELKEELGVDMNGDELIYCGQRRFRFEREFHGSMFHDNQVSNVYALWLDREEEAFVLQEEEVSEVRWMDFADCVSAVRENRISHCIYMEELELLKNALHLHMKSTFSDSPGNHNRWFRPHFSHFCATRLGRFINESRYGGILYLALWLVVLGLVFTLFQTIFLSIAYTGRLTPDDYEVLHVEQTEYDQSIGAYDSGIIRRFSDYLVTVQYEVDGTRYTADLSLGQAFFTGNRVARAGADGSSVLGTIFYKSSDPKRLKYIPARRHILPFSTGKYVCREDTDDFAAQVCALLQQEDYGSLAALSYNGRDIPVTAEDTEEYFHDDLVYFRKNVGDLSLLEGTTVYHDTPWATAVTIRYYSKEAQETYSDYLPITVKDGHYRLDLRWKYMEQIKYYMAPMEGVTGYVYRNAYAKYYGGIVRYFTPFVANKKLGHREKNDVCPEHNAGMAVVPQILTNRAEDFLAIAEILREYGYDTVNLNLGCPSGTVAARGRGAGFLAMPDELDHFLEEIFEKCPLRISIKTRIGKENPAEWERLLAIYEKYPLEELIVHPRVQTDFYKNRVNLEAFARAEKNSRHSLCYNGNIVDAASAAHIREGFPSVDKFMIGRGLIKHPWLLEELSGGRQEKQERKERFLQFHNAILEGYRQQMSGDKNTLFKMKELWAYWGENFADADQRLKKIRKCERVAEYECLVDALFREKELCVMESYTLEEKVLRKVMRNIPMGLIVSKEGFRRKIYYVNDTACEIMGYTREEYIRKMQDGWTDLMDVDLREVIREHNEQIRSGTPFEVLSRPQTKNGGYKWILSRVNVQMQEGPLCYVSFMDVTDRMEREELCRQENEVLREQAMQDSFTKLLNRGALEKHVCEALQERGGDEEDAFILLDVDNFKQINDIYGHGVGDMILMRMAGILNEVFGDHSCIGRMGGDEFAVFLRDIGDRREIEEKIQKLLTEVRAEKERMHLSKEPTASVGVAFVPESGSTFVDVYRAADQALYHVKNSTKNGMAFYDFVMQNEWRGFQRGSWEEEINVRDFIQKNYTPYDGDDSFLEGPTQDTTDLWNEVLELSKQEREAGGVLDMDTKIISTITSHGPGYLDKSKEKIVGFQTDKPFKRSLQPYGGIRMAVKACEDNGYHVDPEVVEYFTTHRKTHNAGVFDAYTPEMRACRSAHIITGLPDAYGRGRIIGDYRRPALYGVDRLIEDKEEQLATTRTIMYSDVIREREELSEQIRALKMLKELAKIYGCDISKPANNVLEATQAVYFSYLAAVKEQNGAAMSLGRTSTFLDIYAERDLKEGTFTEKEIQEIIDQFVMKLRCVKFARTPEYNSIFAGDPTWVTESIGGIGVDGRHMVTKMSYRYLNTLNNIGAAPEPNMTVLWSVQLPENFKRFCAQTSIKHSAIQYENDDIMRVVHGDDYGIACCVSSMRIGKEMQFFGARANLAKCLLYAINGGVDEISGKQVGPKYRPITSEYLDYDEVWDKYKDMMKWLAGVYVNALNIIHYMHDKYCYEKLEMALHDKKVRRWFATGIAGFSVVADSLSAIKYAKVKPIRDENGITVDFEVEGDFPKYGNDDDRVDDIAKEVLHTFIGYVKGNHTYRGGIPTTSILTITSNVSYGKNTGATPDGRKKGVAFAPGANPMHGRDTNGAVASLASVAKMPFMDSQDGISNTFTIVPDALGKDETGEEQNLVALLDAYVEKGGHHLNVNVLNRETLLDAQKHPEQYPQLTIRVSGYAVNFIKLTKEQQDEVIARTFHERMMGKIHSMESFGTVDGPGVRFVVFFEGCPMRCLYCHNPDTWHLEDGQEMSAEEILSRMERNRSFYRTGGITATGGEPMLQIDFLTELFAGAKERGIYTCLDTSGIMFPGCGGTSEEERERLKKVDLLLSVTDLVMLDIKHMDAEEHRKLTGQDNEKILAFARYLDEKQIPVWIRHVVVPGITFQREELEALGRFLATLSNVEKLEVLPYHSMGKVKYDNLGIDYALKDTPQLTKAEAKSAESIILEAMRQARN

SEQ ID NO: 5 - protein, 1127650 aa, Roseburia hominis (residues 751,769-1,127,650 of 1,127,650)
  misc_feature (206027)..(206030): Xaa can be any naturally occurring amino acid
  misc_feature (267748)..(267751): Xaa can be any naturally occurring amino acid
  misc_feature (308138)..(308205): Xaa can be any naturally occurring amino acid
  misc_feature (435301)..(435353): Xaa can be any naturally occurring amino acid
  misc_feature (550632)..(550635): Xaa can be any naturally occurring amino acid
  misc_feature (643397)..(643400): Xaa can be any naturally occurring amino acid
  misc_feature (646104)..(646160): Xaa can be any naturally occurring amino acid
  misc_feature (694148)..(694210): Xaa can be any naturally occurring amino acid
  misc_feature (735460)..(735516): Xaa can be any naturally occurring amino acid
  misc_feature (749571)..(749574): Xaa can be any naturally occurring amino acid
  misc_feature (857718)..(857721): Xaa can be any naturally occurring amino acid
  misc_feature (861866)..(861921): Xaa can be any naturally occurring amino acid
  misc_feature (899281)..(899284): Xaa can be any naturally occurring amino acid
  misc_feature (1126885)..(1126888): Xaa can be any naturally occurring amino acid
VMIEKVHEVNDAASNMAAITEEQSASAEEIEATAVSIQKLAEIVSENSADVQKDSKEMENTAETLKEHISRFTIMKIKNITDIDGFFKVIDSCQGKVELITGEGDRLNLKSKLCQYVSLTSILKTDVEIPELELVAYEPEDTEKIIKFLMKGMKPEETVFHEITLQDKAWMDQKFAEDDRNACEYSFANNFMWRNVYQVRVAELHGCLVVRFIDGEIHCFSFPVGNGDKKAAVEELLAICHEEGIQLLIAPASEQDRAQMLEWFPGRFLIEGDRNDYDYIYTREKLATLAGKKLHGKRNHIARFKDSGDWSYEPMTAENVEECRTMTYTWIHMREEKWNEEMNQEISVLHEAFDHMQELGLVGGVLRRDGQIVAFSIGERLNSETFVVHFEKAYPDLQGAYPMINQQFVLHECEGYAYVNREEDTGDPGLRKAKLSYYPDILLPKYELEESRVVYADPERDAPYIQEIWQKCFGDEEDYIQFYLKHRMTRENMLVIFRDGRPVSMASFLPVQYLCSGAYVDARYVYAVATLPEYRGQKLAEQILRFAEEKYQVPLILSPAEESLTRYYEKLGFKNAFQGEHKNVSGSDITALEVKDTEPVACMEPVTPEEYVRIRDEKCAKEGYVHWDVDAVSYAMELAASCGGGTAAVSCEDKNTRNEQEDDRDILMYDIRKKELVILETTLSDDALSQVLPQLMEETGTSAASYGRERGMIWLPETMADLPVAGDGYLALTLGMRIKITGRNIELTEGLKAAVEDKLNKLEKYFTPDTDVYVTLSVEKERQKAEVTIPAKGNYIRSEQVSNDMYVSIDLVEEVIERQLKKYRTKLVTKQQNASAVFKQEFLDGAADEDEEIKIIRTKKFSMKPMYPEDACVQMELLGHDFFVFINAETEDVNVVYKRKGNTYGLIEPENMQMRHSLFFLWRKKEFELTEGAFCKIFCAKGCTVSTKVSYNCSMQNYPGFMDYIAYQYPLEGERIELLEQILTALAVGRKLEAEQMIYHYGSMIHGRDLIARQVFLWLLGMAEYSRRECIAEERRMKIVVLAGGLSTERDVSFKTGEMVTKALRENGHQVILLDVFMGYSDKEEDLTGIFDRAEAVSVKVAAIPETAPDLEKVKAQRKDQSDNFFGPNVIELCRMADIVFMALHGENGENGKIQAAFDLFGIRYTGTGYLGSALAMNKGMAKQLFLENGIPTPRGTSLKRGEDAAKIETCGIHFPCVVKPCSGGSSIGVSIVHDKAEYEQALKEAFRWENELVIEEYVKGREFSVGVIDFQALPIIEIAPVEGFYDYKNKYKAGSTVETCPAELSEQITKEMQGYAEKVAEVLGLNTYSRTDFLLDEEGRIFCLEANTLPGMTPTSLLPQEAKVTGVDFNQLCEKLIESSMRKYKNMKNMTLEHIAQACGGTYIGEECDREKEIQGAVIDSRLVEEGYLFIPIRGARVDGHDFIPAVFEKGALAVLSEQRLEHPAGPYILVDSTEEAMKKIAAFYRRSLDIKVVGITGSVGKTSTKEMIASVLSEKYCVLKTEGNLNNEIGLPLTIFKIREEHQVAVLEMGISEFGEMHRLAEMAQPDICVITNIGLCHLENLITRDGILKAKTESFEHLAPDGIAVLNGDDDKLCDKKMVNGRPAVFYGIGQEAKTAETETGSKRLAEKEVYATDVEAIGLEGTKAVIHTPEQQFEVVIPIAGEHNVYNALAAVCVARRLGLDAEEMKLGIEHAHTIGGRSNLIRKNGITIIDDCYNANPVSMTASIDVLSQAKGRKIAVLGDMGELGSEEKKLHGMVGTHFAGKKIDALFVTGTLAGEIAEEARRVAPETRVYAEPDKEALEEALLEYRRPGDTILVKASHFMGFSEIVKKLEQPQMKKNIILIGMPGVGKSTVGVVLAKVMGYQFIDADLVIQEKEGKLLREIIAEVGPEGFLKVENRINSGIEAEHAIIATGGSVVYGAEAMEHLGRIGTVVYLKLPYRELERRLSDIKGRGVVLRDGQTLHDLYEERVPLYEKYADVIVDEHHLNVEQTIEKIMELKERFQMKKQTFTKQAVWQAAAVGVLAVGGVLFCLSGQIGIGQTYRQVRVDDRIIGYAPENTDMDDIVRQARQELTQKTGERISGEVVWSSEECRKPFQKLLSENELKEAVENILSEKNAEEKQRVYTVAIDEYRANFATMDEVESFLEKVKASADEADEYGAVIADQGSHVSGILTASLARRDAGAAADEKAPEETQVPLPQAGISAYVICTLEEAFADPKATYETGILDMEFVERVNVFENYVDADQIADVDEQVAEVTKEKESNKIYVVESGDCLSVIAMDHDTTVSSIVALNGLDSADAMIRDGQELIIAVPEPDLQLRVTKGEVYEEDYMEEPIIIDNDSWYTTKEVVQQEGTTGHRERNDVVVYENGVETSREMIHQNVMVASQAAVIERGTIIPPTYIKPISGGRYTSGFGRRWGRMHKGVDWACPIGTTVYASCAGTVISASYNGGYGNNVVISHADGRLTRYAHNSKLLVKAGQHVEQGEPIALSGSTGRSTGPHVHFEIYINGSAVDPLKYISNMEQYVIKGGNPLVGEVEIGGAKNAALAILSAAVMTDETVTIENVPNVRDTNVLLNAIEEIGARVERLDAHTVRINGSFIRDFNVDNEFIRKIRASYYLIGALLGKYKRAEVALPGGCNIGGRPIDLHMKGFRALGAEVDIKYGLVRAYAEKLTGTHIYLDKVSVGATINIMMAASMAEGKTIIENAAKEPHVVDVANFLNSMGANIRGAGTDVIRIVGVEKLHATEYSIIPDQIEAGTFMLAAAATKGDVTVKNVIPKHLEAISAKLLEIGCEVEEFDDAVRVVASKPLRHTQVTTLPYPGFPTDMQPQMTVVLGVAQGTSTVTESIFENRFKYVDELTRMGASIKVESNIAIISGVDQYTGARVNAPDLRAGAALVIAGLGAEGITVVDDIYYIERGYEAFDQKLSLLGALIEKVSDEKEIQKFTLKVSMEAQEIQQKELHTMRGELALLVAVLINSFGVVLMLHSGAGISAISSVPFAFSEVFTRISLGTWTYLFQGVLVLSLMILRKRFVPQYLFSFVVGFVFGELLDVHEAWINLLPLTLPNRILYFAISYLLICIGIALSNRCGLPIIPTDLFPRELADITGAAYSNIKVSFDVICLAVTAGMTIFFLGHLDGLGIGTILAAFTMGKVIGAIGKWMDGRLRFVSVLTPKTAKPCMSESPRQMKEHAGDKLYAKDFRHSMFRKTASSGEFFGVKSRMKELALYNLKEGMVLAKDITTPSGQVVLEKGKELTKQSILRLSFYNIKSACIVDGEEKQAAPKSYSQKIKTSQKFQSFQVDHTIVLSQIRVSFEGYVNEGKPLDTSALLSKVVELFQSCKTSLELFNMLHNMHSSDDSVYVHSLNVSLICRQIGKWIKADDATLDMLTLAGLLHDIGKLKIPTELLNKPGKYTDEEFAQVRLHTQYGYELLKPLPLDAHIKLAALSHHERCDGTGYPSGLTTNDIDPYARVVAIADVYDAMTTARSYRAPLCAFQVIANFERDGLQKYDTKCVLAFLNRIAGTYQNHRILLSDGRSANIVMLNDKQLSRPIVQLDDGSCIDLSTAGDLHIQAVLMEKRLFTSESVTEGHPDKVCDAISDAILDACMAEDPMSRVACETASCTGFVLVTGEITTKAKLDIPAIVRQTVNEIGYNDAKTGFDGNTCAVMVALDQQSPDIAMGVDKALEAKEGGLKDELDTGAGDQGMMFGYATNETPELMPYPISLAHKLALQLTRVRKDGTLSYLRPDGKTQVSVEYDENGKPLRLEAVVLSTQHDDDVTQEQIHEDIKKYVFDPILPKELVDAQTKFFINPTGRFVIGGPHGDAGLTGRKIIVDTYGGYARHGGGAFSGKDCTKVDRSAAYAARYVAKNIVAAGLAEKCEIQLSYAIGVAQPTSVMVDTFGTGKLSDEKLVEIIRENFDLRPAGIIKMLDLRRPIYRQTAAYGHFGRADLNLPWEAVDKVETLKKYLMTRFFAGICGVDKAGMKFKNKIIISFCIIIFIPILLAVAVLFGFQKIQLKSIEQTYGVESDDYSYFSNSMQLLSRFTRESFETLLDLSKQDPDKLEDKAFLEQMNDTLREKYSYLVVRRGDELIYVGDDKEASLLTDLPAYGGEESGADTGIYVDGDKQALIKQIDFVYTDGSQGSVFIITILEETVPELKSLMADVGISIILILILTACMLTVWIYTSFINPIKKLQVAAQNIKDGNLDFTVDVETNDEIGELCRNFEEMRQRLKDNAEEKLSGERENKALISNIAHDLKTPITAVKGYAEGLIDGVADTPEKRDKYIRTIYNKANEMDTLINELTLYAKIDTNRIPYNFAKLNVAEYFNDCIEEIGLDLEAKNIGLAYFNYADEDVQIIADPEQLKRVVNNIVGNSVKYLDKQKGFINIRIKDVGDFIQVEIEDNGRGIAARDLPYIFDRFYRADASRNSATGGSGIGLSIVKKIIEDHGGKIWATSKESIGTVMYFVLRKYQEVPYEQSIDHMSRVLIIEDEVEIADLEKDYLELSGFEVEIENDGTVGLKRALTEDFDMYILDLMLPGIDGFEICKQIREEKNTPILMVSAKKDDIDKIRGLGLGADDYITKPFSPSELVARVKAHLARYERLIGSNTPENDTVEIRGIRIDKTARRVWVNGEEKQFTTKEFDLLTFLAENPNHVFTKEELFRQIWDMESIGDIATVTVHIKKIREKIEMNTNKPQYIETIWGVGYRFKLMKKYVKPEVVETKEYAEGVYLASGGSTDNSSGPEEAVCRFGRKEANAGSDTCQECSKSGGQRNTPLPGEESAREADFTGCIDGRPVKRSMSGKKIAIIYKSLTGNTRQVAEAIRDALGGEEIVYFGEPKPDIVADLYFVGSWTDKGSCDGTVGEYLKQLEGKKLAVFGTAGYGGSREYYQKLACRVTECVPDTSEVLGSFYCQGKMPIGVRNRYVAMLREHPEDQKLNASVKNFDEALSHPDEKDFADARQWAQTMVDAVMEIRILFEDEQIIVCEKPAGVAVQTKRLGQADMESLLKNRRAGKGELPYIGVVHRLDQPVSGVMVFAKTKEAAAALSRQIASGLADKFYYAVTDGVPEAGKGQFTDYLLRDGRTNTSAVVESSTPGAKRAELSYEVLEQKNGRAVLRIQLGTGRHHQIRVQLAHAGMPIVGDRKYNFKENMKPSGEPLCLCSYKIGFRHPKTRRNLAFEIDNPFHLSMAKDNKKLVEAITSMDVDFAQWYTDVVKKAELIDYSAVKGCMIIRPAGYAIWENIQKELDRRFKETGVENVYMPLFIPESLLEKEKDHVEGFAPEVAWVTYGGLNPLPERLCVRPTSETLFCDFYKNIIHSYRDLPKVYNQWCSVVRWEKETRPFLRSREFLWQEGHTAHATAEEAEQRTIQMLNLYADFCEEVLAMPVIRGRKTEKEKFAGAEATYTIEALMHDGKALQSGTSHNFGDGFAKAFGVQYTDKDNKLQYVHQTSWGMTTRLIGAIIMVHGDDSGLVLPPRIAPVQAMVIPIQQYKDGVMDAAKSVCERLGKVCRAKLDDSDKSPGWKFSEQEMRGIPVRIELGPKDIEAGKCVVVRRDTREKIEVALEDLEQKIPEILETIQKEMFERAKAHRDAHIWDAHNYEELKDIAANKPGFIRGMWCEDQACEDKIKEELAVTSRCIPFHDQEQISGTCVCCGRPAHKLVYWGKAYMDKNAKISLPAKVARILNTLGGHGYEAYAVGGCVRDSLLGRMPQDWDITTSARPEQVKALFRHTIDTGIQHGTVTVMLDHEGFEVTTYRIDGEYEDARHPKEVAFTANLLEDLKRRDFTINAMAYNEVTGLVDAFDGIGDLERGVIRCVGNAMERFSEDALRMLRAVRFAAQLGFSIERETQEAIAGLAGNIKKVSAERIQVELVKLLTSPNPGELKVAYRTGLTAVFLPEFDMMMETPQNNPHHCYSVGEHTLKAIEAVPADKVLRLTMLLHDIAKPACKTTDEKGVDHFYGHPVRGSEMARGILRRLKFDNDTTDRVCRLVHWHDDNPELSGKAVRRAMHRIGVEQYPALFAVKRADILAQSGYRRAEKLAYVDAYEQMYRECMEKKECLTIRQLAVSGQDLIAAGMQPGKQIGEMLNELLERVLEDPGLNTKEQLLKIVTGKISDQNRSMYNRPEQVLEQYDLEVRAVSKGRESYICDTTQGQLLLKEYKGSAERAEFLSAILGHLGGQGLLTEQVVRTKEDAPIAVAEDETKYMVLTAVSGSECDTRNRADMIAGAEKLAMLHNAAGTYSETVPEFVCNDPNELQELYEKHNRELVKVRNYIRSKKKKNDFEVLFYGQYERFMEKARQVAQELSAMGQGGQSAGFCHGDYNQHNILFSKNGIGIVHFECFSYQIQVSDLANYMRKMLEKNNWNTGLGMDLICAYDRVRRLTAVELNYLYLYMAYPEKFWKIANRYYNTHKAWVSGRNIEKLEKFIRQEDERERFLEMMRHFTLQPPASMKKKIVRWILPVCMMLLLAGCGKSSNTVVTGTYYNPSKDAENTAQTVGTEADANDVLDAMEQGTEQEGTSIGADLFLITNNDMQAECLILTQLNSGKQYMYNYTIATRFLDKYGSRMPVSGFDAGRIIRVGEKDKQGRLVEAQISDLAWEYPDVTRYSVDEEHGAFKIADTNYSYDEDLFVVSDGSPLRLSDLTALDTLRVVGIDKKIYSISVTTGHGSLKLVNTSVFDGSYIQVGSKVFAQITGEMTIEIPEGTYTAAVANNGYGGSTEITITRGQETVLDLETLKGEGPKYGSILFAVNVEGAWLQVDGQLVDYSQPVELQYGVHTLTVTADGYDTYSKKLFVNSPEATIAIGMTGESGSSSTTTGSETQSSEADSSTSTGESADGQAGSLAGSLAGSHSDSSSSGSSSSSSSTSTGTADTTSDAALDAIVNEILDKNGDSSSSSSGSSSSTSDYLSTLTSLLNALKGNNMGYRETYESWLNNPYFDEATRAELQAIAGNEKEMEERFYMDLEFGTAGLRGVIGAGTNRMNIYTVRKATQGLANYICKVGAQAKGVAIAYDSRHMSPEFADEAALCLAANGIKAYVFESLRPTPELSYAVRKLGCTAGINITASHNPPEYNGYKVYWEDGAQITPPHDTGIMDEVRNVTDYASVKTMPLEKAKADGLYQTIGADIDDPYIAELKKLVLHQDCIDKVASELKIVYTPLHGTGNLPVRRVLKELGFTNVYVVPEQELPDGDFPTVSYPNPEAAEAFALGLALGKKVDADLILATDPDADRLGVYVKDAQTGEYHSLTGNMSGCLIGDYVIGQRKELFGLPEDGAFIRSIVSTNMADAIAAYYGIDLIEVLTGFKFIGQKILEFEETGKGTYLFGMEESYGCLPGTYARDKDAVAASMMLCEAAAYYKTKNMTLWDAMLAMYERYGYYKDDVTSITLKGIEGLAKIQEIMNTLRENAPAEIGGYKVTAVRDYKLDTITDTAAGAVRPTGLPKSNVLYYEMTDGAWVCVRPSGTEPKVKFYLGVKGTSLADADAKSEALSKAVRALIDTMMMGIFLDKERKNKYKYEVGILRTSNIIYIENPEEEFLTMNKAELVAAMAEKTELSKKDAEAALKAFTDVVAEELKKGEKIQLVGFGTFEVSERAERTGRNPQTGKEMTIAASKAPKFKAGKALKDMINAMRLDKFLKVSRLIKRRTVANEACDAGRVMVNGKPAKASVNVKVGDIIEIGFGTKTVKVRVLDLQDTTKKEEAKDLFEYVSMEEKNYNNTAKSHKVLLVNRGNGAFSGVVDVLSFDVAEILLETELGMLLIKGQDLHVNRLSLEKGEVDIEGRIDSLTYSDVKTAGKQAESLLGRLFRMAVSTSIYQELLFLGSSVLVGMGLFFLYDILRIFRRILPHGNIWIGVEDFLYWIIFTGVVFVLLYRENDGMVRGFAFGGLLVGMACYYLLLSRLIVHCQVWIWKKILGIIGKVLGFFVRPVWKTLKKVGAFCGKRLKKFVRAVKIGLCKLMAAKKRKSNRNNRVGKICISMILVVFAAAMSVQIVKAYQKDQEYARKQEQLEVQLQDETARQEELQNYQSYTQSQEYVEDIAKSKLGLAYDNEIIFKEEPMGYMAKESRYDTMQYNRCGASGLKLPMVSLGFWHNFGDTGHYDNMKAMCRTAFDNGITHFDLANNYGPAYGSAERNLGQILRDDFSAYRDELLISTKAGYDMWPGPYGNWGSRKYLIASLDASLKRLGLDYVDIFYHHRMDPETPLEETMGALDSIVKSGKALYVGLSNYDGPTLERACAILNDLKCPFIINQNRYSIFDRTIEKNGLKDTARRLQRGIIAFSPLAQGMLTDRYLNGIPADSRIATDGRFLKETALTPERLSQIRALNELAKKRGQTLAEMALSWILKDGDVTSVLIGASRPEQILDNIAIVGHTSFTPEELDAIDQITLMKKMNARQMMLCMAGSVMCSVGVMGCYPLVPAYFAALYLERVSGPVLLGMMYIGMFVFMPTAAAVKYAVALVVVMGAIRLVEWANEGCPSYMAGSMAAIITMILSVAGGLLEWKDQPGILAAALEGAFILGAVILFNRALHMILHWGRKAGVPERPDGGREERLLGYAESFQGLSQVFHSMSAAHQNGAAEELGQIQNELTGKICASCDACAVCWERDPAPLYGALSGILSAIWNGETPGEEKKQELAQYCRHSSDMVEEAVRVFERVSLNRAWYQRLVENREVIAEQLDAMAYIMQDCAREEKILDVGERHVLSEIQYRAKEQGIVVEELHLIEAVDGRIRIDAVLKSRLGGCVAVKTFLALSGAVLGKKLRTTADARTFIAKEPFRFLIYEDTAYRSVQGIARVKKDEAKISGDNFSFLELERGEMLLGLSDGMGSGSSACKESEMVLDLVERFLEAGFSLETAIRMMNSAMVMKGENDIYSTLDLCMVNLYSGMARLYKVGAAAAFIRREDEVECIASENLPVGARAHLDAKPREIQLSDGDFIVMVTDGVLEYLHVPKPEETMREMILSIKTNNPGILAKKIMDRVMLFTGGRAQDDMTVLAACIWKKAMQKKGMELEGLVKSGDVVLAGVSGGADSVCLLLMLLEYRKHCDFLLEAVHVEHGIRGEASRRDAAFVKRLCEKRGVCCRIYPVDVPAYAKGHGLGVEEAARKLRYECFREAAEDYDGRPVKIALAHHADDNAETMLFRLIRGSGIHGLYGMRPARRLAEGVTVIRPLLGMERAEIEAYLEAQGQPYCRDATNEDTDYSRNRIRHKVMPELKAVNTGAVHHMMQSAQMLRELSDYLEEETRRATERVCRDTPDACVIDAVLFSEYPALLIREVLLVTLQKVAGSSRDIGSVHVEELCTLYTRQVGRVICLPYGVRAERVYEGIRLYREEPAADMERESIEVTGEMLSRAEKEEVVLALPDGRLHLRIRDFSGNMQEIPKKTYTKWFDYGKIKSGLRLRRRESGDYLKIDAAGHTKKLKEYFVNEKIPAAKRDAIWLLATGSEILWVAGGRIGAGCKVGENTEKILEVRLSGGNDCEDQENMKIKKINVHLTEEQIEQRVRELGAEISKVYGDEPVCLICILKGSVFFTCELAKRITSPVEIEFMSVSSYGSGTSSSGVVRIVNDLGTSIEGKNVLVIEDIIDSGRTLSYLLENLKTRNPKTLRLCTLLDKPDRRVVDVNVDYVGFVIPDEFVVGYGLDYDQKYRNLPYIGFVEIEEMNSKRSSYRGFGIYLLLILAIIGIWYWMDGNTSTNSYTRAQFETAVADGNVAQLKIVPNRGEVPTGNVYITFKDSSTQVLAVNDVNDIEDYLRDQQFTSYTVENPPEQSWIVTILPYLIIFAAMFIFFMIMTNQAAANSGGGGKMMNFGKSRAKLMTDDPAKRVTFANVAGLKEEKEELEEIVDFLRAPKKYTRLGARIPKGVLLVGPPGTGKTLLAKAIAGEAGVPFFSISGSDFVEMFVGVGASRVRDLFEEAKKNAPCIVFIDEIDAVARRRGTGMGGGHDEREQTLNQMLVEMDGFGVNEGIIVMAATNRVDILDPAIMRPGRFDRKVHVGRPDVGGREEILSVHAKNKPLGDDVDLKQIAQTTAGFTGADLENLLNEAAIIAAKEDRAYITQTDIKKAFVKVGIGAEKKSRVISEKEKRITAFHESGHAILFHLLPDVGPVYSVSIIPTGAGAAGYTMPLPERDDMFNTKGKMLQDIIVSLGGRVAEELVFDDITTGASQDIKQATRMAKDMVTKYGMSENIGLICYDNDDDEVFIGRDLAHTRGYGEGVATTIDLEVKRIIDECYEKAKQMIAEHRDVLDACANLLLEKEKISQQEFEALFEQMVCPAKPQTMSGLSGATKGHAQKSLNCLWFADTPRGLSKLGKTQMIRDVRRGMVRNTGFCDMISNTDIRYFFDTYYDNFMHSLAWEDHLLEPASREEWLATLRACADDQQQRCADNQILLEQYLYPLSSNPALLSDEGYDLLLSFCRDFYYSNYTEPALLIRIIDILLPHYEDRSDTESLLFLYICAGFSYMELSRTGEPTSRDKTIYFYTKVLSYRDQIEFFESATSRDYIFIAYYNLIRVAPGLGILDIETAYRLWEELCQIRTMPKFCQYDTTNPRIPQLCDCAINDFRAYGAVLNVERVIAPSAILSSLENMTQIYYSEILHEHGSIYECPVFTVFNYHYVQARNGTITWEAAWQILDDYYVHKMQTIGQVSSPDLLAFYTNLPLNLIDVLGHTHFKEEFKQATYRRYRNLITSYLMNQPASLNSYTLNNGVQLVAFHPLILGTFQNRMEKMNFIVDLVVTRHLTTFTHSVMVSYLAEAIGKHILAARPELLRIPSSYLEGNVYASPAEVLDYIVPAALFHDIGKNGMIPIINTQHRKLNDYEFNIIQTHPQKGSDYLSSDPDFLIYQPVALGHHRSYDGTRGYPLSFDNTASPYRDAIDLIHICDCLDAATDYLSRNYHRAKPFDVVLNELKAGRGTEYNPDMVDVILSDRELYNDLKMLTEQNRENIYYDIYLTFVNLRKKRQMSNTTKLALEASLKKLLLKKPVDKITINDLTEDCGISRMAFYYHFKDIYDLIEWACLEDGKRALADKKTYSTWSEGLEQIFEAVLENKPFILNVYHSVSQKKIESYLYKLTYDLLADVVEEECRDAAVSGEDKALIAEFYKYGFVGMMLHWIDGGMKADYRELVQRLSTMLHGSILNAARNFEQKQSASLAKETEMGKGKHIGLGVAALAAGAGVAALAAGSHKNSSERAQKKAIEEKARAEYRNTERGKHEKNSKGIYYTNGNYEAFARPRKPEGVDEKSAYIVGSGLASLAAACFLVRDGQMEGSHIHILEAMDIAGGACDGINDPTRGYVMRGGREMENHFECLWDLFRSIPSIETPGVSVLDEYYWLNKEDPNYSLCRATEERGKDAHTDGKFNLSQKGCMEIMKLFMTKDEDLYDKTIEDVFDDEVFNSTFWLYWRTMFAFENWHSALEMKLYFQRFIHHIAGLPDFSALKFTKYNQYESLILPMQRYLEEAGVDFQFNTEVTNVIFDIKDDKKVAKALECKVNGVEKGIVLTENDLVFVTNGSCTEGTIYGDQNHAPNGDAEVRTSGCWSLWKNIAKQDPSFGHPEKFCSDVAKTNWESATVTTLDDKIIPYITNICKRDPRSGKVVTGGIVSCKDSSWLLSWTINRQGQFKDQDKDKVCVWVYGLFTDVPGDYVKKPMKECTGKEITEEWLYHLGVPVEEIPDLAENSAVCVPTMMPYITAFFMPRTKGDRPDVIPDGCVNFAFLGQFADTPRDTVFTTEYSVRTAMEAVYGLLGVDRGVPEVWGSVYDVRELLDSSVKLMDGKSPLEIELPGPLNVLKKPLLRVVKGTVVEKLLRDHDVIKDGMLMVLFCFSQSSTRLHDWFTGTDLYKKNLESYVRKEGMQMKTKVSIVATVTLLMAIGFICMKNVPIGRIVLSVVWVCHVIYFFCFVKTLPEEKTGSGGIEYEEMKKLFKEALEDSPIIAAVKDDKGLSRCLTSDSRIIFILYGDIVTISDIVETVKSAGKLAIVHLDLINGLSSKEVAVDFLQKYTNADGIITTKPTLIKRAKELGLFTILRLFLIDSMAYENIDRQVKSSRPDLIEILPALMPKVIAKVCQSTSTPVIAGGLVSEKEDILALLDAGATSISSTNEKIWFLMSTRELTCIGCPLGCAITVTMDGSTVTAVTGNTCPRGDAYARKEVTNPTRIVTSTVRVNGGIYPMANVKTASDIPKGRIFDCVNALKDITVNAPLKIGDVVLSDVAGTGVDIIAARNVPAKMKNYDLVIVGGGPAGLAAAVSARDHGIESILIIERDKELGGILNQCIHNGFGLHTFKEELTGPEYASRFIEQVAERGIEYKLNTMVMDIAADAPSGNVITKKVTAMNREDGMFEIHAKAVILAMGCRERSRGALNIPGYRPAGIFSAGTAQRLVNMEGYMPGREVVILGSGDIGLIMARRMTLEGAKVKVVAELMPYSGGLKRNIVQCLDDFGIPLKLSHTVIDIEGKNRVEAVTIAEVGPDRKPIPGTEERYTCDTLLLSCGLIPENELSRSAGVAINPVTSGPIVNDSLETSIDGVFACGNVLHVHDLVDYVSQEATAAGKNAAAYIQNGSSKDAASVEIFPVDGVRYTVPKYVRPTEMDDTLTVRFRVGAVYKNCSIATYFNDTLISKRKRPVMAPGEMEQVILDKKKLAEFPDLSRITIRIEENSMYDVAIIGAGVIGSAIARELSRYQANVCVIEREEDVCDGTSKANSAIIHAGFDAAPGSLKAKLNVRGNEMMDALSKDLDIPFKRNGSLVVCTKDQDRSGLDALLEKGEKNGVPGLRILEREELLQMEPNLSDDVTCGLYAPTGGIVCPFHMTMAFAENAYTNGVSFFLNTKVTSIRKKDGSYTLETIHTDTDTPETFEAKVIINAAGVHADEFNNMVSEHKLHITARKGEYCLLDKEAGTHVSHTIFQLPSKMGKGVLVTPTVHGNLLVGPTAVDVTNKEAVNTTQDGLDSLAKTAALSVKNVPMRQVITSFAGLRAHEDGNDFIIGEAEDAKGFINAAGIESPGLSSAPAIGEMVAGIAADLLSLTKKTDFISTRKGILRPETLSMEERNQLIKEHPEYGNIICRCEMISEGEIMDAIHRPLGARSLDGVKRRTRAGMGRCQAGFCSPRTMEILEREVPMSMFDITKNGVGGNIVIGINKEIMGRGRSEKQKQKLLYMAQLLYGRTDEDHPVTTQEVIDYLEANGIRSERKTVYTDMEELEDFGLDIIRVKERPGGYYLASRKFELAELKLLVDAVQASKFITTKKSRELIAKLETLCGREQAKQLHRQVVVTNRSKAVNENIYYNVDMIYNAIAENVKIRFQYFEWTVNKEMKLRRDGSYYEVSPWLLSWDDENYYLIAYDDRSRDIRHYRVDKMLKIELTAESREGKEQFGSFDVAAYSRKTFGMFAGEDETVTLICEDALTGVMIDRFGKEVAMRRYDETRIRVRVSVAVSRQFFGWLAGLGAAVRIESPEPVVREYREYLETILKTYGEQELMRERTYEIKIEGVPIIVTKKRMKNMYLRISKEDGTVRISAPYQMSDARIAAFARERIEWIRKYQQKYKEAGERRSEKQELDAAEIARRKKQLKREVERLVAKWEPVMRVKVSGITIRQMKTRWGSCNVQTHHININLALLSKPPECLEYVVVHEMTHILEASHNQRFWGFMTKFYPDWKRVRKYLSDETVDMNTLPKDPVMLLSFVNTQLRDHYPSLEEFAATYQIDAAEVISALKNIDYEYDPATNQFIMGQKIDKEVFDKFFKESYCTVEYETVKEEFERIASIGNDLFTGSYEARNLNRENFILYLTSDSYCDFEAAVQEAMDDLNPEILDAVMDVTEAQEDGDEITEVYWDTQRELLHDFLLRLYDEVISTWKMAKASCDSCVYNVYDEDDETYYCEVDMDEDDAARLMQGHYRECPYYQLDDEYAVVRHQMMPVKYVFVTGGVVSGLGKGITAASLGRLLKARGYKVTMQKFDPYINIDPGTMNPIQHGEVFVTDDGAETDLDLGHYERFIDESLTKNSNVTTGKVYWSVLQKERRGDFGGGTVQVIPHITNEIKSRFYRNFTSEETHIAIIEVGGTVGDIESQPFLEAIRQFQHEVGHENAILIHVTLIPYIKASGELKTKPTQASVKELQGMGIQPDIIVCRSEHPLDQSLKDKIALFCNVPNRNVLQNLDVEYLYEAPLAMEKENLAKVACEALHLDCPEPDLKDWEAMVDALRHPNKEVTVALVGKYTALHDAYISVVEALKHGGIAERATVNIKWVDSEDVTTENVDEILSDVSGILVPGGFGSRGVEGMILAAKYAREHQIPYLGLCLGMQVAIIEYARHVCGFNDAHSIELDPNTTHPVIALMPDQNGIEDIGGTLRLGSYPCILDKTSKAYEVYGAEEIHERHRHRYEVNNDFRASLTESGMKLCGTSPDGRIVEMIEIPEHPWFVATQAHPELKSRPNRPHPLFKGFVEASIRCSEKMDNQGSNNNYNNGNSNGGNNGDGGKGNHNGQILMAFILISLIALFIMSLVTNQFNQMSTQEVSYSEFLDMVNGTGKWEGRSVKSVEIGSYQIDITLDSDEKTPYEVTYYCGRVADDELIPLLKEKGVDISGVIPDNTSTWIYSILSYLIPLVLIWVVLGVVMRRMGGGAMGVGKSNAKVYVEKQTGVTFKDVAGQDEAKESLQEVVDFLHNPKKYRDIGAKLPKGALLVGPPGTGKTLLAKAVAGEAKVPFFSLAGSDFVEMFVGVGASRVRDLFKEAQKQAPCIIFIDEIDAIGKSRDTRYGGNDEREQTLNQLLAEMDGFDTSKGILILAATNRPEVLDKALLRPGRFDRRIIVDKPDLKGRLETLKVHSKDVMMDETVDLDALALATAGLVGSDLANMINEAAINAVKNGRKFVNQSDLFDAFELVAVGGKEKKDRVMSDKERKIVSYHEVGHAMVTALQKNTEPVQKITIVPRTMGALGYTLQTPEEEKYLQTKDELLAKITTYMAGRAAEVLVFQSATSGAANDIEQATAIARAMVMQYGMSDKFGMMCLATVENQYLDNRAGLICGEDTAAQIDKEVLAIINHAYDEAIRLLTENREVLDHIAEYLYEHETITGKEFMKIFRELKGIPEPEDEAEKKTFFEQAEEARQELEEGKTAAESQNMDDVLLRNTQDHEEQMFVIEEELKKLPDQPGVYIMHDSRDAIIYIGKAVSLRKRVHQYFQPSHDEGIKKAQMVKQIARFEYIVTDSELEALVLECNLIKEHRPKYNTMLRDDKTYPYIRVTLGEDFPRVLFSRQQKKDKSRYFGPYTSAGAVKDTIELVNKIYQLRTCNRNLPRDTGKDRPCLNYHIHQCTAPCQGYITKEAYRERVDAVVEFLNGNYAPVLKSLEEKMNTASANLEFEKAIEYRELLNSVRQIAQKQKITHTDGEDKDIIALAADDRDAVVQVFFIRDGKLIGRDHFYVKIGTEDTKAQILTTFIKQFYSGTPFIPREIMLPQEIEEQEVLADWLGEKRGSKVYIRVPQKGMKEKLVELAQKNAKMVLAQDREKIKREEGRTIGALKEIEQLLDMKGLNRVEAYDISNTSGFESVGSMIVYEKGKPKRSDYRKFKLRTVSGPDDYASMYEVLTRRFTHGMREMEEMEEKDLSEEYGSFTRFPDLIMMDGGRGQVNIALKVLEELHLNIPVCGMVKDDNHRTRGLYYHNVEIPIDRGSEGFKLITRIQDEAHRFAIEYHRSLRSKEQVHSVLDDIPDIGPARRKALMKKYQSLEAIREATEEDLAQTDSMSPQAARSVYRFFREKERENQPSDMSGVGVAKVAQILDLCNFIPQMELKGHRIMIRDVNRPALQLSGYFEHFEQSRVQIIGTVEYTYLQQLDEKKKEAIYREFMAYDIPCVIFCRDLKPDEMFLKIAEESNLPVFGTKRSTSEFMAELIYCLSEQLAPCITIHGVLVDVYGEGLLIMGESGIGKSEAALELVRRGHRLVTDDVVEIRKINEHTLIGTSPDITRYFIELRGIGIIDVKTLFGVEGVKEKQQIDLVIKLEDWKKDNEYDRLGLEEEYTEFLGNKVVCHSLPIRAGRNLAVICEAAAVNHRQKKMGYNAAQELYRRVQENLTKKSDDEEDEMERMNAWEKYPEGKKRNEVFDFAEEYRKFLSDCKTERECVTYFAQKAEKAGFVNLDTVLEKGTKLAAGDKVYANNMGKGLALFVIGEKSMEHGMNILGAHIDSPRMDLKQDPLYEDTDFAMLDTHYYGGIKKYQWVTLPLALHGVIAKKDGTVVKVSVGDKPGDPVFGVSDLLIHLSGEQMEKKAAKVIEGENLDLIIGSIPAEADEKDDVKEKVKANIMKILAKEYDIEEEDFLSAEIEVVPAGEARDYGFDRSMIMGYGHDDRVCAYPSFEAIAAMEKPEITSVCLLVDKEEIGSVGASGMQSRFFENTVAEVMNAAGTYSELALRRALKNSSVLSSDVSAAFDPNFPSVMTKRNAAYFGRGLVFNKYTGARGKSGSNDANAEYVGALRAIMDRNEVSFQTAELGKVDQGGGGTIAYILANYGMRVIDSGVAVLNMHAPWEIISKVDLYEAYRGYIAFLKEQAMKQQLLDTLEQIAGKENIHPNEPMSRHTTFRVGGPADVLVTPEAGKLAAVTGACREAGEPYYIVGNGSNLLVGDGGIRGVVILTRDGMDEISADGVRITAGAGALLSRTASLAASHALTGMEFAAGIPGTIGGAVVMNAGAYGGEMRDIIETVTVLDETGAQHVLSVEELELGYRTSCILKKHYIVTQAVLKLAAGEEQAIRARMKELATQRAEKQPLEYPSAGSTFKRPEGYFAGKLIMDAGLRGYRVGGAQVSQKHCGFVVNTGNATAQDVRTLIADVSAEVDRQFQVKLEPEIKMLGEFMKFVILTGMSGAGKSTAIKMMEDIGYYCVDNLPIALLEKFVELSSLQENAELQKVAVGIDIRNGQALEEIRDVLARIKKKKVHYEILFLDAEDSVLVKRYKETRRNHPLSGGDRVDKGIEEERKRLAFLKESADYIIDTSQLLTRELKAELDKIFVQNQDYKNLFITILSFGFKYGIPADSDLVFDVRFLPNPYYVEGLRAKTGNDKEIQDYVFQYEEAHTFLDKLEDMLNFLIPNYIAEGKNQLVISIGCTGGKHRSVTLANALYERLSGQKGYGLKIEHRDIGKDALRGKMSFSSEVKTELAKHLGKSRHCQIAELAALIAFEGRIPAAESENRLLMQKYQLLLAELFHIEEIHTEEEARSVFSTVKMYNDATGEAEPEDTVKGLLIQQSCCKRAYIRGAFLAGGSISDPNKSYHFEIVCRSIPQAEQLRDVINSFDMDAKIVARKKYQVVYLKEGSQIVDILNIMEAHVALMNLENVRILKEMRNSVNRKVNCETANISKTVNAAVKQLADIEYIRETAGLSYLPENLKEMALLRLEYPDAPLAELGTYLNPPVGKSGVNHRLRRISEMADSLRQQTVMKKSVVVKMQQDFEARPIANLVQVANRYESKIYLEHGDSRVNAKSIMGMMSLALLNGEEILVDAEGADEAEAVAAIEEFLVSMGTKKKLLFVFNPFSGKAQIKNQLLDIVDVMVKADYEVTIYPTQAQGDAIHKIETEVGDYDLVVCSGGDGTLDEVVTGMMHREKKVPLGYIAAGSTNDFATSLGIPKNMVKAAETAVAGRVFPCDIGAFNGDFFVYVAAFGLFTEVSYKTSQEWKNVLGHAAYILEGAKCLHDIPSFLMQVEYDNVRLQDEFIYGMISNSTSVGGFKGMTGKDVLLDDGVFEVTLIKKPKNPIELNEIIASLINLVDDTDMIYSFKTSEVRFTAKNTIPWTLDGEFGGDHEEVVVKNLCRAVEIMVPQGEMLVSAKEMLEKAKAGHYAVGQFNINNLEWTKSVLLTAEELQSPVILGVSEGAGKYMTGFGTVAAMVKAMHDELGITVPVALHLDHGTYEGCYKCIKAGFTSIMFDGSHYPIDENVEKTKELVQVAHAMGMSIEAEVGSIGGEEDGVVGMGECADPDECKRVADLGVDMLAAGIGNIHGKYPANWKGLSFETLDAIQQKTGVMPLVLHGGTGIPADMIKKAISLGVAKINVNTECQLSFADATRKYIEAGKDLEGKGFDPRKLLAPGAEAIKATVKEKMELFGSVGKANDMSETGYLNAAEIFGENVFNDAVMQERLPKKVYKKLKEVINEGKELDLETADVVAHEMKEWAIEKGATHYTHWFQPLTGVTAEKHDAFITAPMENGKVLMSFSGKELIKGEPDASSFPSGGLRATFEARGYTAWDCTSPAFVRQDAAGATLCIPTAFCSYTGEALDQKTPLLRSMEAINEQSLRLLKLFGNTTSKKVTPSVGPEQEYFIVDREKYLQRKDLIFTGRTLFGAMPPKGQEMDDHYFGSIRERIGAYMKDVNEELWKLGVTAKTQHNEVAPAQHELAPIYAEANVAVDHNQLIMETLKKVAGRHGLQCLLHEKPFAGVNGSGKHNNWSITTDDGINLLEPGKTPHENIQFLLVLTCILKAVDRHADLLREAAADVGNDHRLGANEAPPAIVSIYLGEQLQDVLSQLISTGEATHSISGKKLETGVKTLPDFMKDATDRNRTSPFAFTGNKFEFRMVGSQDSIAQSNVVLNTIVAEAFAEACDVLEKADDFDMAVHDLIKEYATEHQRIVFNGNGYSDEWVAEAEKRGLPNICSMVDAIPALNTEKAVTLFEKFKVFTKAELDSRVEIEYETYAKEINIEAKAMIDIAAKQIIPAVIKYTTVLAQSINAVKSACGADISAQTEILTEVSDLLADAQNALDKLKDVTEKASAMDEGREQAVYYRDTVKTAMDELRAPVDKLEMLVDKSMWPMPSYGDLIFEVMKKLEIIIKPEKLEDLKGVLDTEEVNGLNIVNSMGYGNQKGIIKNYRGAEYSVNLLPKIKVETVVADEVAPKLIDKIVDEINTGHFGDGKIFVYDVEDAIRIRTGEHGTKALMDMSVWFLMGTALVFFMQCGFAMVEAGFTRAKNVGNITMKNLMDFCIGTVAFYLLGYNLLCGDGKFVGWGLNPFTNFGETDWSAFVFNLVFCATAATIVSGAMAERTKFITYCIYSFIISLCVYPIEAHWVWGGTPWLTDMGFTDFAGSACIHMVGGITAFIGAAMLGPRIGKYDKNGKPKPILGHNLLIGALGVFILWFGWYGFNGAAATDTMQLSQIFATTTIAPAVATVTAMLYTWIRNGKPDVSMSLNGSLAGLVAITAGCANVDAIGAFIIGAIAGVLVCVAVYFIEDKLKVDDPVGAVAVHGCNGIWGTLAVGFFDYKDGLLYGGGVHHLAIQCLGILCIAGWTIITMTIVFVVLKKTIGLRVTAEEEIEGLDSTEHGLESGYPDFVSRELHMPGVFAFLAVGSINCDCIVNMKKKSAKAILRMDYPQEKVEKKSIEMGQDYTKHNLLFISKYPEIIHEFSDAMKDRDIEIETAQNGIEAAAKIKKKNYDVVITGLSLEGYNGEQLITYLNKTAPSTVCIIYTTTISSAQLHFFINERNVFRVFLRPVDFRGAFWEALEEAYEYHAVQVKNEEDTGARRQEQEKQEREIEIMDQRMRSQRQTRETTNRYMKRLAGLTIKEYTPQALSAEARGHLEHIEVRTIDFCSEQGEHAAESLDKAEEVLQTVRSFTENMNYGKKRTRKREHELASKGTMIRKKFNVIFCKALLICFFAVVIVGGCSAFGVISGIIASAPSIEDIDATPTGYLTTVLDNQGNQTATLVASGSNRKYVTIDEIPINLQHAFVAIEDERFYDHNGIDLQGILRAGLKGVASGFHFSEGASTITQQLLKNTVFTQWTSEQSMADKFERKFQEQYLALQLEKVVDKDWILENYLNAINLGQNTLGVGVASERYFGKDVSELTLSECAVLAAITQSPSYYNPITHPDHNKERRQKVLNNMLDQGYISQSEYDEAVADNVYDRIQVVNVESQDENINSYFVDEMTDQIVQDMIDRLGYTETQAYKALYQGGLTIESTQDPDIQNICDEEVNNLENYPTDPKVSFSYRVSIQSPDGTISNYSQQTMLSYYQKSNKNYSINFDSEDDARAAIEQYKADLMQDGDVVVDGSETLTFTVQPQAALTVMDQSTGEVKALVGGRGDKTANKTLNRATDTTRQPGSTFKIIAAYAPALDAGGLTLAAVQDDAPYNYGSGQGGAVNNYDKRYRGFTTLREGIIDSINVVAVKTLAQIGPSLGYDYIRNFGFTTVGIDESGNETLALGGLTNGVTNLELTAAYATISNSGTYIKPKFYTRILDHDGNVLLDNTAPESHTVLKETTAWLLTDAMKDVMTQGTGTPAYFGSSMAQAGKSGTTTKNRDALFAGFTPYYTCVVWGGYDDNAVQNSGQTTYPKKIWKAVMSRIHEDLPYADFEKPDGIVTATVCKESGKLAIDGVCTNDPRGNMAYTEYFATGTAPTDYCDHHILVNICADSGQLAGANCPNTYATGVYVIGGSANTEDAPYLLTEEALANTCTMHNAPSTPYESTPYTPVPGVTDIPSQDTNTGTTDSGTSPGDSGTSTGEGQTTGDNTGGSAENTGDNTDGSQMYYTKELCQNKEKTENTDILHSFLRIRIAKKKGAVLLFEKIKKRRERTRVAGLWIIMKTVYIGGEGEIVEKKSRFIATVRPVASEEEAVAFIAEMKKKYWDARHNCSAFVIGDRQEISRCSDDGEPAQTAGRPMLDVLLREEIHNAAVVVTRYFGGVLLGTGGLVRAYQGAVQAGLAASTIIDKKEGIHLAIGTDYTGLGKLQYLIAQQNLTLIDTVYTEKVELQLMVPAEQQQEVEKEIVEATNGSARISWGEKVLYALIDKKIEIFEKNTMYQFESRVRYSEVDSERHLTLPAVMDYLQDCCTFQSEDMDIGVEYLAEQKQAWVLSSWEIKVRRYPVMGEKICVETWPYAFKGFYGYRNFRITNGQGEELVLANSVWVYMDMERMRPMRIPEKVADAYRPEIGEELPGEWGARKLSVPEGGTAMQPVPVAGFFIDTNHHMNNGKYILVAKESVPENFVIGGVRAEYRRAAMLGDVLHPVVAVAEEKITVVLTDGEDQIYAIVEFAAAEKNMKLGEYQKLKVIKKVEFGIYLAEHEGDETRVLLPQKQVPADAKLGDEIEVFLYKDSKDRIIATTNQPKLTLGGLAVLEVAEVGKIGAFLDWGLEKDLFLPYKEMTKKVQPGDEVLVTLYIDKSRRLCASMKKLYDLMRTDSPYKKGDTVNGRIYEFGHDFGTFVAVDDCYSAMIPAHEDCSHLQIGDVIEAKVTGVKPDGKLDITMREKAYLQMDADAEKVMEVIEEFAGVLPFTDKASPEVIMRETGLSKNAFKRAVGRLYKERRIEITERAIRKLMKNVISTDKAPAAIGPYSQAIEVNGMVYTSGIIPVVPATGEIPEGSVAQAEQALTNLSHLLEAAGTSMANVVKTTVFIKEMNDFAAINEVYATFFEGAYPARSCVEVARLPKDVMLEIEAIATKMDFSNVDLALGTLTAYDSGSSVSSGSLAYAVGTAVLSQSLDLTQQMGASMIQMMEHSVNPELGGNIDMYVMQQTIKPERHKAAAGRENLGAYVTRICRKMAQIVEKTCRKRKYCVKSAEYYKIMNRRTLRATGIVLTGMLLAGDPVSMIYAAPVAGVSVATTAEAVAVGTGSSSPSAGVSLAVADCLVASNEEVAQEAAAQQEQVSENETPVVESEYADIAIAQVDNYVNVRTEPNTESEVVGKLYNNSAATILQTTEDGWYEITSGNVTGYVKCEYVVAGDEELAKSVSTRYAKVTTTTLYVRTEPSTDAAVLTMVPIEDDLVVTDESIPGWALVTTEEGDGYVSTDYVTLTTEYVQAESKAEEEARLAKEEAEREAAAAAAASARKKNSESSSSSSSSSDSSASYSAPTSSNGQAVASYACQFVGNPYVYGGSSLTNGTDCSGFVMSVYSAFGIGLPHSSSALRGCGYEVSLSSAQPGDIVCYSGHVGIYIGNGTIVHASTPSSGITYSNVTYRSPICVRRIFMSVNCKKVIHNAETEKQEKSSYTRSYSHYPQKSGKKIWFTMIKKIDIMGIGLDNYTVRESMRQVENYLSNDVLNTIENISMQMLIASETDPVLHNVISELDLSVIGEKEILKAADADSMQRVQETEQNDFSYEFYRRIERNKRSIFVLGQTEEGVQKVKAELQEAFPKLILAGEYALENCVGNLDAVINEMNATTPDVIVSILPSPLQEHFFAEHKDKMSATIWFGMGELGVHGKKHGLGSFVKNRLHLGRLKNSMNKYQDQEKSGEAEMISNQILQNTIDGLKGITRIDLCIIDVEGKVLAATFPEADQYIEPAQAFVESPADSQVVNGYQFFKVFDEHQLEYILLASGDSDDVYMVGKIASFQIQNLLVAYKERFDKDNFIKNLLLDNLLLVDIYNRAKKLHIDTEVRRVVFIVETNRDKDGNELEKIRGIFGTKTKDFVTAVDEKNIIVVKEVGENEGYEELNKIAESMVNLFRADADSDVHVAYGTIVGEIKEVSRSYKEARMALDVGKIFFEEKDVIAYSTLGIGRLIYQLPIPLCKMFIKEIFDNKSPDDFDEETLTTINKFFENSLNVSETSRQLYIHRNTLVYRLDKLQKSTGLDLRVFEDAITFKIALMVVKYMKYMESLDYMIKLEHVSKSYSAGIPALNDVSLNIEEGEFVFVVGDSGSGKSTLIKLLLKELEPTEGTITINGRKLNKIRRRQIPKFRRNIGVVFQDFRLLKDRNIYDNVAFAQKVIGESNRSIKKNVPKLLSMVGLAAKYRSYPRQLSGGEQQRVAIARALINKPKILLADEPTGNLDANNAWEIMKLMEEINEQGTTVVVVTHNLEIVKAMNKRVITMQKGVVVDDTASDHYGKDTSVEQDDDLFDDFLDDGGDDDYANMRISTFFYTIKQGIVNIWKNKLFSLVSIATMTACIFLFGLFYMIVVNFQSMVKNAESGVAVTVLFDEGISDQRIEEIGELISERPEVSHYDFISADEAWESFKEVYFEGNEAAAASFAGDNPLANSASYAIYMNDISMQDSLVTYLKSVDGVREVKQSQQVANTLTDFNSLIGYISAGVILILLGVAVFLISNTITVGISVRKEEIAIMKLIGATDYFVRAPFVVEGIVIGLIGAAIPLGILYALYGKIVMYISDKFSFISNMMKFLSVNEIFHNLIPVALILGVGIGFIGSRITIRKHLRVMKFTMIRRIAALGLILVLAAGIPIQASSASTEKVTEDAASTKSLQEAQDEKAQLEKALKEAQSTIEDLRDSKGDIESKVTELNQQLIDISARITDLENQLTAKSEDIQETKDELAGAKEREAQQYADMKVRIQFMYENGQTSYLEALLSSRNISEFLNSADYIAQIQSYDRQKLTEYQDTVESIVNLEAQLEQEYTDLEALKSTVESNKATVAAMMRQKESELADISGDIEDAQSDADYYAAEIQAQEELIAAIKRAEAEKAAAGVEEHPYTGGAFRWPCPSSTRVTSDYGTRVSPMSGASSNHKGIDIGASAGADIIAAADGTVTAASYSSAAGNYVMIDHGGGLYTVYMHASSLLVSPGQTVSAGDVIAKVGSTGISTGSHLHFGVSLNGSYVSPWSYLGGMDEQRENMQNGMIENETTGEQKPDGGKERRRRGMGAGILLGICGTLVVGALGIYLTCRFTGSQILITNAAADTDGTTLLDAKTTAKINELSAYIDLYYYEDTDVQDLKDGLYAGLLEGLDDRYSVYYTADEYAQTQVSMTGQYYGIGAGLAQDKDTMQVTITKVYEGTPSESAGLRNEDVILSVDGTEADTMDVTDLVKLIRGEAGTTVHLEIYRPSTGENLSFDVERADVTLPSVSSQMLNDTIGYIRIESFEKDTANQFEKALAELEGEGLTSLVVDLRYNGGGLVDSVVQILDDILPEGLIVYTEDKNGHREEYRSSGDTHFDYPMAVLINQDSASASEIFAGAIKDYNYGTLIGTTTFGKGIVQSLFPLEDGDAIKLTTAKYFTPNGNYIHGVGIDPDIELEYEYLDPDGEQYEIQYDNQVQKAIEVLSEKTQNDMKLRIYRVITGGLLLLCMVMIFRFSAQPASESEQVSGGVAYRIVETWSHLTETEYTQSEMEAYADRIDYPVRKLAHMTEYGILCLLACAFVHGYSGNWKVCGISAAAIAALYAATDEIHQLFVPGRAGRFLDVCIDTLGAVIWLLFFTALRKLWEKIAKRRGFQYNKNRKKMKEVITVVELDQFKVTLNAYREPLQEVRDSLMEAADFWNDPEASQKKMKELKSMKDDVATYASLTTQFEDIETLIEMGYEENDATLIPEIEEMLTEFTTTYDAIRAKTLLSGEYDGDNAIVSLHAGAGGTESCDWAAMLYRMYTRWADDKGYSVEVLDSLDGEEAGIKSVTFQVNGENAYGYLKSEKGVHRLVRISPFNAAGKRQTSFVSCDVMPDIEEDLDVEINDDDLRIDTYRSSGAGGQHINKTSSAIRITHLPTGIVVQCQNERSQFQNKDKAMQMLKAKLYLLKQQENAEKAAGIRGEVTEIGWGNQIRSYVMQPYTMVKDHRTGVETGNVDSVLDGKLDIFMNGYLKWLSLGCPKGLGGDDEQMSSDVIRTLKWVFGKGGLIEEYKRQEQMLEETPKSVASMTRIFAPQISRDFPGMNLEQFEALAQQQLVAALQAVSAGNLESVARASDELKEQVSRQIEGNRAAGVRETYEQIRIHQTEISNYEKKNGTCVITFQSAVEHYHYKEKAGKIIWGYKDRKLQTKYNMELLYVQDAAQQTEGNAFGLNCPNCGAPMKGLGQQICEYCGSPVVPVDTRVWRMVRFSEVDYHHVMGIIKAIGSAISGGLADQWLEVFEADDMGEQTVFTSGVLIRRGQNTKGTNNTVSNGSVIHVYDNQFMMLVDGGKVVDYTAEPGYYKVDNSSLPSMLNGELGESVKETFNRIKYGGQTPTAQKVYFLNLQEIKGIKFGTRNPINYFDNFYNAELFLRAHGNYSIKITNPLQFYAEVIPRNKDRVNYDEIGEQYLSEFLEALQSAINQMSADGTRISYVTSKAMELGKYMQDILDADWNQMRGMEIQKVGIAGISYDEESQKLINMRNEGAMLGSDFNVMRGMAVKNITEGVRDAGSNANGAMAGFMGVGMGMNAMNQTLSGLGAMQTPADMQANAGMQQGSAAPAGQMPAAGAVPAGQTPGAGTQVGWTCECGHVNTGKFCSECGKPMPVSDEWTCECGHVNTGKFCSECGKPKPVSGEWTCECGQTNTGKFCSNCGKARNMAIISFKCPNCGGELIFDPATQKYKCEYCNSLFTQEELDAMKPMQGGEPDAVAQEQAGGERADETEAAEQAAGERESEPEGEAVYYSCPSCGAEIVTDATTAATFCYYCHNPVVLGKRLEGTYLPNKIIPFEISREEAEKKFLDFVGKKKYVPKAFFDKKQIESMTGVYFPYWVYDVELEGKMQGDARSVRMWTTGNTQYTETKYYAVEREGNVSLRNLTENALKKANVKLTSGVMPYAYDKMKDFHMGYLSGFLAERRDIEQNAVQGKMQHTMRESAEKLMRDTISGYNSVSVKNTFFAPKKEIWSYVLLPVWTITYKGRDGKVYYYSMNGQNGNICGDLPVDRPRLALTSLLIALGILVFGLLGGYFLWMVEKMKKSLLWCLVCLVCLVPCSGAALAAEADAAQDAADGYVYDEAGLLTADEIADLNDEIASFMEESGWNVYAVTTDDAQGKSATAYADDFFDEHSPDKEDGVALLIDMDNREITISTCGIAIRYLTDSRIDDILDAAYAKISNGDYNGCMHSMLTGVENYYEKGISEGQYNYDSETGKISRYHVLTLGEIFGVLAVAIGAGCIIYFTISNSYKVRGKGYYYAYQQNSKVNLRVKEDRLVNQTTTHHRISTSSGSSGGHSSSHSGRSTTHTSSSGRSHGGGSRKFMKEKGQYYVLKEKAVPDVLLRVVEAKRLLDSGKTDSVQDATEQVGISRSSFYKYKDDIFPFHETAKGKTITMVIQLDDEPGLLSIVLKTVAEFHANILTIHQSIPINGIASLTLSVDVLPETGDVTQMVARIEEQTGIHYVKILGREMIKVAVMGYGTIGSGVVEVLDINKNSIAKRAGEEIGVKYILDLRDFPGDPIQEKVVHDYKVIANDPEVQIVVETMGGVEPAYTFVKAMLTEGKHVTTSNKALVAAKGAELIALAKEKNVNFMFEASVGGGIPIIRPLNSCLTADEIEEITGIVNGTTNYMLTKMTEEGSEFDDVLKDAQAKGYAEKDPTADIEGYDACRKIAILTSLVCGQQVDFEDIHTEGITKITATDIRYAKTMGRAIKLLASSHKVGDGYVAMVAPFLLPATHPLYNVNDVFNAIFVHGNVLGDAMFYGSGAGKLPTASAVVADIVDMAKHLDTNIAVEWSSKKLELVDYRNVENCYFVRTSADEKRIEEVFGEVSYVTAEGVSGETGFVTARMSEADYEKKAAELGSVLQMIRVTQMKYLVILGDGMADRPIESLGGRTPLEYAKTPKMDELAAKGEIGMVHTIPDGMKPGSDTANLSVLGYNPREFYSGRSPLEALSIGVPMKDTDVALRCNIVTLSEEEDNYEDRTIIDHSSGEISTEECAVLLEAVKKELETDIFHFYVGTSYRHCLIWENGEVVDLVQPHDVLGQKIGDKLPENEALRTMMKKSYDILVNHPINIERKKKGLNPANSCWFWGAGTKPALYPFTERTHKKGAMISAVDLLKGIAVGTSMKVITVDGANGGLDTNYEGKAKAALDVLTRDGYDFVYVHLEGSDEMGHQGSVEKKVKAIERLDERIIRPIAEGLAAAGEDFRMVVLPDHPTPISLRTHTADNVPYLLYDSTAERSESWHYNEREAAQTANFIPEGHKLIEYLLQMMRRRNDGAAVAMTAMLVSGMLLLSACGSADAVKTDAIGATEEMAQTGQAAACVVTYYDSDGKTVLQTEEVEKGACAKEYTPEKDGSIFVGWFATPQMSHKFDFSQAVTEDTSVFAGFVTYVEDTREFAIVGSGTSPVLLESNWGAVIGDAQKMTKEESDSENVYTITLDLSEGDQFQFAMDSSWGDQRGYGYLDTIELDGMDYFENSGSLGDTGVKHSNIKCAVAGNYTFTLTTYPGEDTYETDNANYTEENREAFNINPYDTITWTYNGASENAGGDVQTDYYIKGAIVTGWEDVYSDETKFTEQDGTYTLKIDLTEGDEFMFTSMVTVGDTSSAGTEYIRYTNIGGGDDASLSHVTEGGGENLIAAESGTYVFTYDPAEQVLTVDVEMSQKITIRDVAREAGVSVATVSYVINNRTDMRISDATRKKVLQVINLLDYTPNQSAKALATSRNRMVALYLDTDVPALKRAEQMYLLECFSTFLHAQDYDLIYLSRTYTEKYDAADAIVAYDISEEYFHQIGDNNFSPLLALDCRIGDPLFFEIYSDYAQMATGAHTFFSGEPYCFLSLDTSNAGKKSYAADMFPEVHYVNSPSELAPFSGRNLLVTDHTLYELLASTANVCYLPSFSARKFQVLFDCMNSALRREPLQQHAIAVSMNESAILHIPDSQYCFAVGEKKLVIRLRMAKEDADASVTLIYAGKYQFQQSREQIPMEIRYTDRLYHYYETTLVLTDVRLAYVFCIRQQGTTYYFCEDGVVLQYDFAEGFYNFFQMPYINRNDVLPTVKWMKSAVFYQIFVDRFFCGNTKKDRSYINMEWGALPTPKSFAGGDLCGIIEKLDYLKDLGITAIYLTPIFRSISNHKYDTMDYMQIDPQFGTKEEFGELVRMAHAHGIRIVLDAVFNHCSMQMQQFCDVMEKGAESPYYDWFLIDGAYPVPSRANYECFAECTYMPKLDTANREVQEYLIGIACYWIREYGIDGWRLDVSDEVSHVFWRRFREAVKKEKADAVIIGENWHDAYPYLRGDQYDSIMNYAFTKACLDYFARKTFDAKQMAEKLSSNLMRNMEPVNRMMLNLLDSHDTHRFYSEVGENPDRLLAALALEMVFPGAPCIYYGTEICTPGGYDPDSRRCFDWEKVHTDTDVRKKLTELTHIRSCTAITDGNVELAAENGMLCVRRKAGGEGVSLYINMTEEQRRQEHCLKADSKVLSAHRASVLPAAGDGKMTCGVCVEPEGYLIVREQREALDMGGNSAEKRKQMKRKKEVALLLLTAVLAAAGCADEKTTGEKTTESGSAAAVSGSSVFDGELEENVTIRVLENDTAISKGYFEELITAFNEAYADQGITAVDANMDQYLDLANDGPYGYGPDVLYQANDVIMQYAKGKHIYPLPVQQLSCYEQIPESAWKAYETTVDGTTYCCGVPVNVQAPMLYYRADLLPEDWQENWDEDQNGVPDMVENWNDLYAYSKERHEENPAQYGYMKSLYDVYFSSGFLFSYGGYVFGEENTNPEDVGFSAGEAEKGAWVLQQLAGVMNEECIDDTITTNAYSKLGDGTYFATLSTPDMYSTFADELEKEYEAEGMNEEEARETAKQNLIMTTLPKLPESGDLSESDPVLIDMKAMGGVNGYAVSAYTKAPNACLAFIDFATSYEMVTRRSEMLGIAPARGDAAESAGDVSEKIYANLENGNVVLMPSISEGSQIWTPAQTFFTDLAKDAFRSGSEKKYQDLPALKSGLEQVDTQIHDAIYTLKMKQKIKRAAAWFGDSSGNVKLSMVIMGAGQFRYGAKGKGVCFFLSEVLMICYMAMRGCRDLAGFFTLGTTRGDAWLGVEGDNSVVMLLMGIFAWIVLAAFVCIYCGNVRDAYRMQKRIEQGRSVLSFREEAAQLLDKKFYVTVLALPVIGVFIFQILPVLFMILIAFTNYGGDIVPPELVDWVGLANFKKLLTLTQFAPTFFKILGWNVVWALVSTALNYFAGLGLALLLNKDCVRGKAIWRAFPVLAYAIPGFITLLAFKFMFSYGGPVNQIIVAHGGGAVGFLDLDAKWTARLIGLLVNCWISTPQIMLLATGILSNRDASLYEAARIDGAGRMQQFRKLTLPFVLFSTMPVLIGQFIGNFNNFGIFYFLRGGLYMDGYFLASDTDLLINWLYNLSIDNNYYCIGAAISLIIFFITSAISLVVYIKSPSYREEDTFQMSRKTEKKRRMSAGRILDTGMTYLILLAVAFVFFFPCLWLILASFSKSGTIYSFDGFFPAGYSLVSFKRLFTDTALYNYPRWFANTLFVAAGSCILGTFLVILTAYTMSRFTFAARKPMMKITMVLGMFPSFMGMIAVYLLMTQFNLINHLWGLILIYSAGAPMGYLTQKGFFDTIPKAIDEAARIDGATNFQVFMKINLPLSRPIIVYTALSSFTWPWSDFILPKLLLKEKNLYTVAVGLMSLDETEFARFAAGSVFIAVPIVLLYFFLVKDMVNGMAAGAVKGMQTVLLIVALSMDVFLASVACGAEQIRIEKKTALCIGAVCSGVLFFSLVCGKLIDGVVREKYAAYLCFAGLFLVGAYKLTEYGIRAYIRRHHFLCKQVKMKFSQLNFIISIYNNPAAADRDCSATMSVTEGICFALAMSVDGFFGGLGAAFLDISIAGTVCLNLVFSALAVLGGSAVGKYAADRCKRDYSWIGGALFVVLAFSKILMEMILIPVHMRGAYRFYDDVSFFYALRMGSTGQERISQMAKYVMALDAGTTSNRCILFNEQGEICSMAQKEFRQFFPNPGWVEHDANEIWSTMLGVAVEAMNMIRATAADIAAIGITNQRETAIVWNKETGEPVYNAIVWQCRRTSDIADALKAKGLEETYRQKTGLIIDAYFSATKIKWILDNVEGARELAEQGKLLFGTVETWLIWKFTKGAVHVTDYSNASRTMLFNINDLCWDKEILEELEIPECMLPTPRPSSEVYGYTDPSFLGDAIPIAGAAGDQQAALFGQTCFHEGEAKNTYGTGCFLLMNTGEKPVFSKNGLVTTIAWGLDGKVNYALEGSIFVAGAAIQWLRDNMKMIDSSMDSEYMAKKVHGTHGCYVVPAFTGLGAPHWDQYARGTIVGLTRGTNKNHIIRATLESIALQVCDVIDAMRADAGIDLKSLKVDGGASANNFLMQFQADMINAPVKRPQCVETTAMGAAYLAGLAVGYWKDKEDVVNNQKIDRIFTPEMEEEERKAKRKGWNKAVKYAYGWAKDEPEEEEEMNLKIQQYPGYRQLHRKHRILWSEKPRESVSGSARFRFILMEEFYGSGIVKEEQIQMEIRLLYGNEIQWAVQTAHEVYEQCVRPYTRNAAEVQQYYDYMNLPNLSQEMLAGRLFLWGAFENGQMCGVSAMQNVGHITALYVRPQYFRRRIGSNLVDRMCNFAASRLQCGRVTVQAAPSAANYFYHTGFTLIQGAPAGMYVPLERRIWSVPMTQGYMGNIGGSGSTSAQGGGVPVAQPRRTKPEINYPKKKVSARMVLWLTAVTIAFAVAVVTGITVYHITQEGITGGYEMPDPVGDENTETDDGQELMDTTTKGTRTKYRLAEAMKECMKTTPVDNITVTQLTELCGVTRQTFYRNFIDKYDLINWYFDILLHKSFEHMGSGKNIYESLVKKFIYIREERVFFSAGFKSADQNNLKDHDFRLILAFYEDLIRQKTGKMPDEEIGFLLEMYCQSSVYMTVKWVTEGTKMPPERLAELMVKAMPEKISELFEQLEILYMANRIMLNQTSYHGAGAIAEIVNEAKAHDYKKAFVCSDPDLIKFQVSTKVTDLLDQAGLSYEIYSNIKANPTIENVQTGVAAFKKSGADYIIAIGGGSSMDTAKAIGIIIANPEFEDVRSLEGVAPTRKPCVPIIAVPTTAGTAAEVTINYVITDVERKRKFVCVDPHDMPIIAVVDPEMMSSMPKGLTASTGMDALTHAIEGYTTKAAWEMTDMFHLKAIEIISKSLRGAVANTPEGREGMALGQYIAGMGFSNVGLGIAHSMAHTLGAVYDTPHGVACAMMLPIVMEYNADCTGEKYREIARAMGVEGVDAMSQEEYRKAAVAAVRKLSEDVGIPSKLEAIKESDLDFLAESAHADACAPGNPKDASVEDLKELFRKIMMKIRQLYAYELRPAAALVMETYSRMEQPYVANPKEIEDFKRYADEDHLWVESCKNKLFLFGAFDDNDQMCAVGAIDAAGAVTLLYAGLNFQHRGLEAEVLREMEEFATVGRSIAREEIKIPGKWMQYTATAGAPEQSSVTEQQTAPGQQSSVTGQQTVPGQPSVTGQQTAPEPQAYRNQNTGYGQDYGQQQYQNTGYGQGYGQQQNQNMGYGQSYGQQSYQNTGYGQGYGESYGQQTAPQKKSRALLWIVLAVIAGAVLLVTVPAFILFHAVNRTVQDTLTWNESSAEADRDGEDGSDTEDDTAVEDTEEEREVLELPDSLGKDFFVTQDDIYVADQLSYTVTAQHIEVPNQRKDGFEEYDVSYPVITYADGRDATGVNEILRNAACAQLDTMYPEPQEEYLYLDEDYPYLACYVDYEITYMSDEILCVAFQDHYFNGSMWGEFCDLRTRVINLATAERYEVEDVLRSDDTFAEAYYEKICEKSDSFNDAPAFTARMAGQTMDGEILEGRYYSNYVLCKNDIYVNLTYHYYDEGLIMHGWDSTQWTMEELEAYRTDSDLWEKYLKMSVQHAGSIIRQARLNAGLTQEQLSDGVCSTLSLSRIENGSAGVSPATFQTLMAHAGIFCEAYPTFSTRADFDCFYALKEVRFYLDSWQLTPACQLLDHIEMLNWADNKFYYQEWLLLHCKLQLRSGHANHAHTYELVRFALKITRSDIDNAAIHSLFLSSVEIELFIYLAQEALYLGDTATAHHVCQQISSYLSARSLSFLERDRLLAENAVVYTKYLLTVCDYKSALELSDFYRHQMILNLDDGLIHELTFLTALGYYYMGQQDRFLTLFKTAFFSAHSINSCYATICRNYVSNHLSATLVEDLNLFSDIPLISFPLKLPINVSSMGDGTYDFFSHKVLTLGGLIRSLRKDQKLSQSALCRGLCSKSKLSKIENETQQPDIILAQTLLQRLGISDLVFTFYGSEKENKLQELQLRLAKTRMNHKTLQLDLVKKMEMLCNSKDICYLQFAAYKSAICESDNDQKLKGLKNALFMTLPGFQFDKILDYRLSWIELTILNNICRTYATINPTHGIYCFYKLLEYTSHVPLDVLEKKRSFPVTLGMLIRFLYTENRLSEIVALVPLFSDAISSMYFTGNIFSHYCQALGSLGLTNSAKEFAHYAYYNALLMEDIYNASGLKNDLKKNYNISLLMLKYEIVSILRNKAAYIFLLVVLLFGLKATVELQRSITSSQDTNYIKRELQYELVMHRQLLESELATARRDAGDAKRRKFNTNAIQFRKWRIEELQELIALLEVGGTESQQFQKEYKAYGVICSIVSYQMFVYPERGCSPVEVRCADMFQKWGRQLGLYDLPFDISSMTANPYVSSELMEASVAAYENNMGRLEHLLNDYDKKSLGLDSGSPYAFLETLFCENAYVLTILDICILLFSFGYIMEGKNDHRYEFMTVQPYSEWKKYRHYVTSFFVAAGVVCAIGIGVWFLYWGMRCGFDGIDSHMFVDVKTYKRFYSYEHLEDYSYEGLARMYADYKYTDGGRGVMLYTTYPLGSLPLYRFLLYMCILAALKVLFFAMLGSGIRVLIQHSQGGIAVVAAATVLTGYSQLTGWGKPYNPFAIGSCWNVTLGSERITWLYAVLELTFSCILIMIITCTVSGKKDRIMKVLQVEDIEKSKKRKKILKGLSFSVDEQEIVGLLGPNGSGKSTTIKCISGLYRTDRGRIRICGNDIKSNRLEALKQIGIAMEVPALYPELSGIQNLRMAATARKVPKERVEELAVFTDLGDRLLDRTGTYSMGMKMRLNLAIAIVDQPKLVILDEPTNGLDPEAVFRLRREIEEIRQRGSAVLISSHQLSEVEKIADRIVAIDDGMVCFDGKLDDLSDRFENLEEFYKNLYGADKKMKAFLQNEIRLFFSRKNYLVWIVGVLAVVFAYRLYYVTQYENYAQTVLEELEENAKDITIWESEYQRQCMELWGDNSAEKFAHASLLLNAWKQYEQTNIRLRYYWEQAWDENGIRRTVLEEDENLIAIEELGEEVEYTGIFRGSVADWRARMLLHKAYQQSGTEEPVCPVVPQAAWLWKEAFSGNSVLFLIFTVLIILLHFDAWANEFEYATCYRLYILPIKKEWLYLERFFVRVLVSVVCVGSAAGILFLLGTARYGTGGQMLLVISEQGTQTVISIWSLVREEILGMLLYIVFLTAAVLLISFIVKTKMNALMICAAFCMTGIVQTTASDGTGKGIVEWLPQLSALTLLMLLAGCILIRIREDMKAFLILEDGNVFTGTSIGSTREVISEIVFNTSMTGYLEVLTDPSYAGQAVVMTYPLIGNYGITPDMESGRPWPDGYIVRELSRMPSNFRCEGTIQDFLAKYDIPGIAGIDTRALTKILREKGTMNGMITTNENYNIEEIIPKLKAYTTGNVVDKVTCTEKRVLKKQGNAPETKKVALLDLGAKRNIAQSLRERGCEVTVYPAHTSAEEILAANPDGIMLSNGPGDPKECKEIIAEIRKLYESDTPIFAICLGHQLMALATGADTHKMKYGHRGGNHPVKDLATNRVYISSQNHGYVVDTDTLDPKVATPAFVNVNDGTNEGLSYVGKNIFTVQFHPEACPGPQDSAYLFDRFINMMGGAKMPRNQEIKKVLVIGSGPIVIGQAAEFDYAGTQACRSLKEEGVEVVLVNSNPATIMTDKDIADQVYIEPLTVPVLEQIIAKEKPDSILPTLGGQAGLNLGMELSEKGILDKYGVKLIGTTAETIFKAEDRQAFKDTMEKIGEPCAASEVVHNVQDGIKFTNTIGYPVVLRPAYTLGGSGGGIAHDETELIEILTNGLRLSRVGEVLVERCIAGWKEIEYEVMRDANGNCITVCNMENIDPVGVHTGDSIVVAPSQTLGDKEYQMLRTSALNIISELNITGGCNVQYALNPESFEYCVIEVNPRVSRSSALASKATGYPIAKVAAKIALGYTLDEIKNAITGKTYASFEPMLDYCVVKIPRLPFDKFITAKRTLTTQMKATGEVMSICNNFEGALMKAIRSLEQHVDSLMSYDFTGLSREELVKQLHVVDDRRIWVIAEALRRGMDYDVIHDITKIDKWFIDKLAILVEMEQKLKSEPLTVELLKEAKRIEFPDKVIAELTGKTETEIHDMRYANGIVAAYKMVDTCAAEFEATTPYYYSVFGSENEAEETHPNKKVLVLGSGPIRIGQGIEFDYCSVHCTWAFAKEGWETVIVNNNPETVSTDFDIADKLYFEPLTPEDVEAIVKLEKPDGAVVQFGGQTAIKLTESLMKMGVKILGTKAEDVDAAEDRELFDEILEKTKIPRAAGGTVFTAEEAKEVANRLGYPVLVRPSYVLGGQGMKIAFNDDEIEEFIGIINRIAQDHPILVDKYLQGKEIEVDAVCDGTDILIPGIMEHIERTGVHSGDSISVYPAPTISDHVKETIVEYTKRLAQALHVIGLINIQFIAMNEEVYVIEVNPRSSRTVPYISKVTGIPIVDLATKVIIGNTIRGLGYEPGLAPTADYIAIKMPVFSFEKLRGAEISLGPEMKSTGECLGIAKTFNEALYKAFLGAGVTLPKYKQMIMTVKDADKPEAVGVAKRFEALGYKIYATRSTAKYLQEHGVNALRVNKITQESPNVMDLILGHKIDLVIDTPTQGNGDKTRDGFLIRRNAIETGVYCITAMDTANALARSLETAMDTLTPVDIAKVKNLMNKQKCTNSIKEEIIMLAKIKAFFMENIDGVAMGVEAMYGVDIHPYYNMEEQKNTYENVTLEPDVGFDIRFVTMDHNSPFHWHREMEILYILNGHATVHMEGEEYELNPLDAVVMDYARIHEVIYALPQTMGICIHVSRQLLRRYLPEAEPFAIRCAGQRLRPGQQEYYNEICGYLKELTVLYVNQNETYRLKSTARILELLACLVEHFSEPVSMVATQTRAGKMERLEQICMYVDHHYREEMTLQEAADELGLNREYFCRFFKQSTGSSFMRYVNQVRLNYIYQDLLHTDDPVQEIMERHGFFNQKLFYRMFKERYHCTPRQARRMAENNPYVEAKMTVRDTHESPKIVCNLRTHLVECSKLGKTRIIENVKHDADRNAGFGGMTIPEEGEISMQFVKTADLKPGMRLAKPIYNRMGVLLYERDTRLTIQGINSIENFGLIGIFILEPAEPLPPLSREDLEFEQFQTIYMFKLKDNMDKLVDNLVPSTLLSLVDDIQRHYGSLDHKLNFTQTLRSSADFVYKHSISVGILSAMISNEMQLPAEDIRALITASLLYDFGYLYVPQAILDKGDDLSDSDRNFIQMNLERGYESIRPRYEECNLPKISLEIIQQFIFQKSQTLKIKDPSPETRLLCDILKVADQFDRLTAMNINNPPVSEVAAMSFLRRHSRTYNPRVVAALAECIHILPTGACVDLSDGEKALVLVENAADFTRPMILKFSNNMIYDLSDPVIGDSLRVTDIMKTMDNRIAIDEEALEHFVADQYIRETADRFRQKKLAIAQRKQKAAQKKSMDDLLDNARVLTPPPIAPVPEEDASPIRKAPRKRMKLVMIQIPWRRVAGAALVMCLLLANTSYAETTQDNINDAKNQIEDLKDQKKDAEDTVNDISGKKDALESDLSGLNGQLSDIVAQINDLEGQISDKQGEIDQAKEDLAAAEAQSAKQYEDMKLRIQFMYENGSTPVWQMLAEAESFSDFLNRTEYITDINAYDRKKLVEYQDLQEQIAAQKEDLESDMTELVAMQDDMKKKQANVSSLINTTKANLAQTQEDLADAQSNVADLEDKINQMVEYEKQLEIQKAKEDAARLAAIKEQEKEDTSTVVYVPTDSDQYLLGAIIQCEAGGESYDGKLAVGSVVINRVKSSYFPNSVSGVIYQSGQFSPVASGRLAYRLEAGVDGSCLQAAQDVLNGNITVGCLYFRQNNGIIQGTVIGNHVFYMAKKVVLAGACRTAIGKMGGALSNTPAAELGSIVIKEALNRAGVKPEQVDEVLMGCVIQAAQGQNVARQASIKAGLPIEVPAVTLNVVCGSGLKCVNEAATMILAGQADIVVAGGMENMSMAPYAMTKARFGYRMNNATIIDTMVNDALTDAFNHYHMMITAENVCEKYGLTREELDEFSANSQQKCEKAIAEGKFDDEIVPVPVKVKKETVMFAKDEGPRPGTTAESLSKLKCCSGKEGGLVTAGNASGINDGAAAIVVMSEEKAKELGVKPMATWVAGALGGVEPEIMGVGPVASTRKVLERTGLTIDDMDLIEANEAFAAQSVAVARDLKFDMSKVNVNGGAIALGHPVGASGCRILVTLLHEMQKRDVKRGLATLCIGGGMGCSTIVERDMKVGVIGAGTMGQGIAKAFAQVDGYEVALCDIKQEWADGGKEKIKKGYARLVEKGKMTQEAVDGILAKITPGLKEDLCKDCDLIVEAAFEDMGVKKTTFQELDKIAKPECIFASNTSSLSITEIGNGLTRPMVGMHFFNPADRMKLIEVIAGVNTPEETVEAIKKISVEIGKTPVQVNEAAGFVVNRILIPMINEAAFIKMEGVSDIAGIDAAMKLGANHPMGPLELGDFIGLDICLAIMDVLYKETGDSKYRACPLIRKMVRGGNLGAKSGKGFYVYNADRTKTPVDAQMDFTLDKKHEMARSLFREFAENEVKPLAQEVDETEEFPVENVKKMQKLGFMGIPVPKEYGGQGCDPLTYVMCVEELSKVCATTGVIVSAHTSLCIDPIMTYGTEDQKQKYVKPLATGEKLGAFALTEPGAGTDAQGAQTKAVLDGDEWVLNGSKCFITNGKVADVYIVIAITSVTEDKRGRKKKNFSAFIVDKGAPGFSFGTKEKKMGIRGSSTYELIFEDCRIPKENLLGVEGKGFPIAMHTLDGGRIGIAAQALGIAEGALDRAIAYTKERKQFGRTIAQQQNTQFKLADMAARIEAAQLLVYKAAMAKATQKVYSVEAAKAKLFAAETAMAVTTEVVQLFGGYGYIREYDVERMMRDAKITEIYEGTSEVQRMVISGALLKMNIVVCIKQVPDTKGGVKFNPDGTLDRAAMLTIMNPDDKAGLEAALRLKEQYGAEVTVLTMGLPKADEVLREAMAMGADKGILVTDRVLGGADTWATSTTIAGALRNLDYDLIITGRQAIDGDTAQVGPQIAEHLGLPVISYAQDIKIDGEYVVVQRQYEDRYHELKAKMPCLITALSELNQPRYMTPGGIFDAYDKEVTVWGRADLKDVDDSDLGLKGSPTKIAKASDKVRKGAGEKVVLDPDESVAYLIGKFKEKHIIMNKMGLEEYKGVFVFAQQVDNVLDGVAFELLGKGKELAKDLNTEVTAVLIGSGVKELADQLAEYGADRVIVVDDPQLKDYRTEPYAHALASVINEYKPEIMLVGATAIGRDLGPTVSARVKTGLTADCTMLEIGDFPLNAAPGQEQQHNQLLMTRPAFGGNTIATIACPYNRPQMATVRPGVMQKIAPIAGAKANVVEYNPGFTPNDRYVEILNIVKAVKNTANIMDAKILVSGGRGVGSKENFKLLEDLAEVLGGTVSCSRAVVENGWLPVDLQVGQTGKTVRPQIYFAIGISGAIQHVAGMEDSDLIVAINKDEDAPIFDVADYGLVGDLNKIVPALTTALKAELGKMRQTVTENRLFSKKDLRKLIIPLILEQTLAITVGMADTMMISSAGEAAVSGVSLVDMFNNLIISVLAALATGGAVVTSQCIGAGRREEACRSARQLVFTEAAITIGISVLVLLFHRQILGLFFGQIEADVMQNAIIYLIISVFSFPLLAVYDSCAALYRSMGNAQITLKISLLMNVINVVGNAIGVYVLKLGVAGVAIPSLVSRGVAGVVLFTFLHNPDNLVFLTRGKFKVDATIVKRILFIGIPSGIENGIFQLGRVLVVSIIAAFGTSQIAANGVANSLDSMGCIVGQAMSLAMITVIGRCVGAGEEGQVRYYTKKLLGETYFYTAVINSIILLLLPWILQIYGLGEETTRLSYILVMIHDGMAIFLWPASFVLPNMLRACNDVKYTMVVSIFSMITFRIGFSYLFGVHMGWMAVGVWAAMVIDWVFRVLCFVGRYLAGTWRKKCGLVAPTAMTKSKFSTKYLVEMALLVAIILLMAFTPIGYIKTAGLEITLIVIPVAVGAVTLGPAAGAILGGVFGITSFIQCFGMSAFGTLLLGVNPVFTFLVCVPTRILDGWLTGLIYKGLKKTKIPSAGSVTLASLCCPLLNTTFFMGTLVTLFAGTMREQFGMTKVIPFIAAFVGVNGVVEAIVCFVIGTAVSMALKKALRYMHTFFSNEFPFVFPSEIPRCGLLILLLITQTIYAYCGNSFFVCKKEHEKAGVFLETSTKESIIVCDEMDYDTVRLDDENNAVVIIDQTKLPGKIEIISLHTAQEIWNAIYLLQVRGAPAIGVAAAYGIYVLAKRMDTEDYDTFYREFVRQKEYLDSSRPTAVNLSWALNRMQRVVEAHSGETVAQIKEALHRESVAIQEEDIWVCRMIGEHGLTLVKPGDGILTHCNAGQLATSKYGTATAPIYLGEERGYHFRVFADETRPLLQGARLTAFELQSSGVDVTLICDNMSATVMKNGWVNAVFVGCDRVAANGDAANKIGTSVVAAVAKYYGVPVYICAPTSTIDLNTPTGAEIKIEQRPAEEVTEMWYKERMAPEGIKVFNPAFDVTDHELIAGIVTEYGVARAPYTESLAAIFAEKEKRAREKKEAMPENSNCSGASSCSKESCEGCPSNAKNKAGGGIAKEPMNAASNVKKVIGVVSGKGGVGKSFVTASLAAAMNRAGYKVGIMDADITGPSIPKMFGIHGQVYGTDDGMVPMETENGIKIMSINLLLDDEEAPVIWRGPVIAGVVKQFWNETVWGDVDYLFVDMPPGTGDVPLTVFQSLPVDGIVIVTSPQELVQMIVKKAYNMAEMMHVPVLGLVENFSYLKCPDCGKEIKLFGESHIDDVAKELGIPVFGKLPLDPAFAEQADKGAFATMENAYLDAGVEKLKTLMKIKIEIDESAAEDEVIIRCRGLTKQVAAVQRAVRDVTNASEKILLYKGNTEYYVTLSKILFFETDENGISAHTRDEVYQTRYKLYELEDMLPGVFMRVSKSTILNTDQIYSSDRNLTASSVVAFLNTHKKVYVSRYYYKPLTQKLEEKRLHHEKMKSSKVFWGIFFILAAVYVVISKFGILPDIGVFSIILTVFFLWLFVEGIRNVNFWEILFSIAFICIIYDEPLGITALTPWTVLGAAFLGSIGLSLIFGGKKRKWKTVTGNVGTSSSEQYTGEEIRCENSFGSAIRYINSDNFRRAAIENNFGSLSVYFDNAIVQEGSANVSVENNFGETNLYIPKEWKIQNNLDRSFGAIRETGSSIGTSSTVLYLNGSANFGEIHLHYIMNEKDGAIRDASVLGVPKMLILGLQHMFAMFGATILVPILVNSYFGEDVLHVQVTLICAGIGTLFFHLCSKFKVPAFLGSSFAFLGGFATIANMDSGVFADMSNADKLSYACGGIVVAGLLYLILALIIKLVGVKKVMRFLPPVVTGPIIICIGLSLAGSAINNASTNWLLALIALVTIIVFNIWGRGMFKIIPILMGVIISYIAALIFNAMGMTNADGSALLSFTDIANASWVGVPAFSLCKFNLSAILVMAPIALATMMEHIGDISAISATVDQNFIEDPGLHRTLIGDGLATSLSALVGGPANTTYGENTGVLELSKVYDPKVIRIAACYAIILSFIPKMAAVIGSMPSAIIGGVSFMLYGMISAIGVRNVVENHVDFTQSRNLIIAGVIFVCGLGFSDGLTFTIAGTSVTLTALAVAAIAGIFLNAILPGNDYHFGKDITGDANRGIDMKPNLHEDTSYADTEEMSRSSSELKRISRDILNNRYSVPMAAFLTASLIPTLIEIPFSMTLGDYPGTPQLIISTIADILILLITQMLDTGVMLVHMNMTRGQTYRIRDVFTPFRNGAERFFLAAVLFDVFLVIAGIPAIAGVLYFYKTGVSDLSGALLAAGSILGLIFTFCVLLTYRMVFFFLLDHPHLSVRDAFRTCRKFMRGRRRKLLYILFSFLGWGALAICSFGIAALWISPYMTQTLLTFYLDGTGELDQIPVRDYDQEARRFTGSIFMEIGMFQTDRRVDRDFYIMGWCAAGIFAALFLFVRVTGIPVWKFLLPCPFHALTGAYCPGCGGTRAVRALLAGKWLRSFVLHPFVPYAALLSGWFMISQTIERLSGSRIRIALRFRDVYIWIALLLIVVNCLVKNLALFVWHVDLLAMNNKRRSQRMENAALLLGVIGAATFCLVYPALICGSLAIVFALLSRGGERTLTSRAKIALILGAIALGIVLAMIIYTFAIAELYYGGVENMARQVYGTLGIDFDTLMNSLGQMDIIAKISEELGIKRHQTEAAVKLIDEGNTIPFIARYRKEATGALNDEVLRNLSERLTYLRGLEERKETVLASIEEQGKLTDELKAQILSAETMVLLEDLYRPYKPKRRTRATIAKEKGLEPLAGVITLQMIKTPLIEEAAKYVDAEKGVTTAEEAIAGASDIIAESISDEADYRTHIRDLTVKKGRMTSTAKDPETESVYEMYYDFDEPVAKLAGHRILAVNRGEKEKFLTVKIEAPQEDILRYLEKKVIVRDNPQTNEVLRDVVRDAYDRLIAPAIEREIRSNLTERAEDGAIRVFGKNLEQLLMQPPIAGQVVLGWDPAFRTGCKLAVVDPTGKVLDTTVIYPTAPQNKVAEAKAVLKKLIAKYHITLISLGNGTASRESEQIIVDLLKELPVKVQYIIVNEAGASVYSASKLATEEFPNFDVGQRSAASMARRLQDPLAELVKIDPKSIGVGQYQHDMNQKKLGEALGGVVEDCVNKVGVDLNTASASLLEYVSGISKTLAKNIVTYREENGRFVSRAGLLKVPKLGPKAYEQCAGFLRIGDGKNPLDATGVHPESYDATKKLLERLDYTLSDVKERKVEGISKKIHDYKKLSEELGVGEMTLQDIVKELEKPARDPREDMPKPILRSDVLEIKDLTPGMILKGTVRNVIDFGAFVDIGVHQDGLVHISQMSDKFIKHPLEVVSVGDIVEVKVLSVDPKKQRIQLTMKLNGMDTNSTITGRTTTNSISSVRYMSVTAMLSAVAFILMFLDFSVPFMPAFIKMDLSELPALIGAFSMGPVCGILICLIKNVLHLFITTTGGVGELSNFLLGVAFVLPAGLIYRHKKSRRSALIGSLLGAVIMGVFSVVSNYFLVYPVYYNFMPEEAVLGAYQVIVPSVKSILQCLVCFNMPFTIVKGLFSVVITFLVYKHISPILKGANRMPLKFDITLTAEDMYRFNMYQTYSGFHGWFSIAFSILIFVVAGVTRGKIEAAYTALYIVFGIVFLVYPPVSLYLRSKRTLAMSEVLRGTLHYEVDEEGLHVSQKEESALLPWEQIYKMVATKHNVLVYSSRINAYVIPRAQLGESYAALQTQAAAHLPAYRLKMKMTEKIYETYSPEETHALGKRLGAEAKPGDVYTLVGDLGVGKTVFTQGIAEGLGITEPVSSPTFTIVQVYEEGRMPFYHFDVYRIGDIEEMDEIGYEDYFYGDGLCMIEWANLIEEILPERRSEVTIEKDLEMGFDYRRITIREHQEDRKMKILGLDSSGLVASVAIAEDDNLLGEYTVNYKKTHSQTLLPMLDEVARMIELDLSSIDAIAVAGGPGSFTGLRIGSATAKGLGLALEKPILNVPTVDALAYNLVGHRDMVCPLMDARRNQTYTGLYRFDGNDMQVLRGECAVGIDEIAADINSRGEAVVFLGDGVPVFKAYLEEQLTVPHSYAPAHLNKQRAGAVAVLGMQYYREGKTESAAEHRPEYLRLSQAERERKEQEAAKGKENVMSIIRSMTAEDAAKVASLEAEIFSQPWSENAFLDSLCLPDTIFLVAEESGVIQGYIGMYLAADEGEITNVAVNPACRRRGIGEGLLTEMKKRAADHKIARIVLEVRVSNEGAIRLYEKQGFSSVGIRRGFYEFPREDARIMVCALMRRKQRETDDRMENISMSRRNGVIYCNRCGSPICTEKEAGKSSFLTICKEWGYFSRHKDGTVHRMDLCEPCYDAWVRTFAIAPEVEQKTELIMLDVCLLGTGGMMPLPRRFLTAAMLRYNGSSLLIDCGEGTQVAIKEKGLTFKPIDVICFTHYHGDHIGGLPGLLLTMGNADRTEPLTMIGPRGLERVVNALRVIAPELPFEIRFIEITEPEMRLELNGYCIHAFRVNHNVTCYGYSVEIKRAGKFDVERARAAAIPQKYWSRLQKGEILSGEDGTVYTPEMVLGPARRGIKMTYCTDTRPTESIVAAAEGSDLFICEGMYAEPEKLVKAKQYKHMTFYEAADMAKRAGVREMWLTHYSPSLVHAENYLPQVREIFPDAFLGKDGKNVELMFEDEDMKKSGVIKAVITILIILLIVGVYYFFTTQRRTSVEDTVELTEIQKLITKNLDTNYPATPREVVKYYNRILECFYDDTYTDDELESLADQARKLLDDELLENNPRDQYLSDLKADIEDYHNKSKTIRSSNVCDSNDVVYQTVDGRECAYVTASYFMNENNSFDRTNEMYVLRKDDDGDWKILVFYQVEGDSSDEQMNSNEIKILAIESSCDETAAAVVVNGRDVRSNVISSQIALHTLYGGVVPEIASRKHIEKINQVIGQALSDAGMTLDDMDAIGVTYGPGLVGALLVGVAEAKAISYAKKLPLVGVHHIEGHISANYIENKDLEPPFLCLVVSGGHTHLVKVLDYGKYEILGKTRDDAAGEAFDKVARAIGLGYPGGPKIEKVAHEGNPHAVEFPRAKIVDGPYDFSFSGLKSAVLNYLNGCKMKNIPIVQADIAASFQKAVTDVLIGNAMKAIDEFGMDKFAIAGGVASNGTLREGMRAACEKKGVAFYHPSPIFCTDNAAMIGVAAYYDFMRGQRDGLDLNAVPNLKLGERMEKITAVVLAAGAGKRMHSDVHKQYMMLAGRPVLFYALQAFAESAVTDIVVVVGAGEIDYCRKEIVEKYHIQKVCAVVEGGRERYHSVYEGLKAADGSDYVLIHDGARPLVTADIISRSIACVREGDSCVVGMPVKDTIKVVGADGFAKETPERSSLWQVQTPQTFPYGRIRKAYEKVMAQGDSAVTDDAMMLETAFGEQVRVIEGSYQNLKITTPEDIMAAELYLNRKSEKKCMSASDFVSLPRLDNPTGACPTHRRQWADFLDLLRDVNTIFDFFAMRLLIVRHGDPDYEHDTLTEKGWREAELLSERLSKLPVKEFYVSPLGRAKDTASLTLQKMNREAKECLWLREFDTKIDRPDCPDQKSIAWDWLPEDWTREEEFFRRDLWATQQAMREGLAPGAHEGNGIRVQKKPDVGVGAEYGWVVSNFDALLAEHGYVREGDIYRVAKANCDTLVFFCHFGLECVLLSHLMNVSPMILWHYTCAAPTSVTTVYTEERRPGVASFRVCGFGDTSHLYAGGEFPAFSGRFCETYACDEERHDMGKALKDRKLKFETLQLHVGQEEADPVTGARAVPIYQTSSYVFNNSEHAAARFGLTDAGNIYGRLTNPTEDVFEQRIAALEGGVAALAVASGAAAIAYTLQNLAHAGEHIVAANNIYGGTYNLLAHTFPEYGITTTFVDPFNYDEVEQAIQENTRAIHIETLGNPNSDVVDIEKIAAIAHAHQIPLVVDNTFATPYLVRPLEYGADIVVHSATKFIGGHGTAIGGVIVDGGRFDWEASGKFPSLTEPNPSYHGISFTKAAGPAAFVTKIRAILLRDTGATISPFHSFLFLQGLETLSLRVERHVENALKVVEYLNNNPKVEKVHHPSVSEDPAQQALYKKYFPNGGGSIFTFEIKGDEQTAKDFIDHLELFSLLANVADVKSLVIHPASTTHSQLTTEELLEQGIKPNTIRLSIGTENVDDIIEDLAEAFAAVMRNSKVQFIVHAAMIAAIYVVLTYFISAFNLASGAIQVRISEALTILPYFTPAAIPGLFVGCLLANLLTGAAIYDVIFGSLATLLGAVGTYLLRKHKFLCTLAPVVSNIIIIPLVLRYGYGLTMEYGGRDWSIPFYMLTVGAGEIICCCVLGTILLNALAKVRNAIFKKEDMAEITLRKYHGLGNDYLIYDPNRNACELQERQVEALCRRNLGVGADGILYGPFFDGDKMRVRIFNPDGSEAEKSGNGIRIFSKYLKDMGYVTEESYVLHTKAGETRVTFLNEQGDLMRVDMGYPEFVAKEIPVVGFDGEIVNEAIFFGDNFYNATCVSLGNPNCVLMLEEVSQKKAMQLGPYVENSRYFPNRINMQLCQVLDRENIQIEIYERGAGYTYASGTGACAAAAASHKMGFVGDRVTVHMHGGELLVEFAWDSRIDMTGPVVYIGSITLAEQFFAMLDRIDERDKQERMHRSIVKYWNVNYIPTPYAEPKEEQTGEKEDAVTGQQLPVEPELTVSSANYGNEEVTDEVTKGQIDKILHEKTEAIRSLIEQNKQTEEEQDIPEEMASAPIQHIIEMRFLRFDFLLKSMLHSGRFYTENFQQEMQNVMEVRQNLMSSYKVEICGVNTAKLPVLKEEEKDALFARIKQGDAAARETYIKGNLRLVLSVIKRFSGNHENVDDLFQIGCIGLIKSIDNFNPALGVKFSTYAVPMIIGEIRRYLRDNNSIRVSRSLRDTAYKAIHTREILAKTSCKEPTLEEIAKVSGLTQEEIVFALDAIQSPVSLYDPVYTDGGDTLYVMDQISDKKNREDNWIEELSLNDAMNHLNERENFILRLRFYEGKTQMEVAEEIHISQAQVSRLEKSALKSIRTYLSMMYNGLIKKMLGGMHMKLEFLGAAHEVTGSCHYLEFADKHVLVDCGMEQGPDLYVNQEIPVNASTIDYVFVTHAHIDHSGLLPMLYNHGFRGQIFTTTATHQLCEIMLKDSAHIQMFEAEWKNRKAKRAGRPEVVPLYDMNDAVGVLGHFVSCDYHSVINVCEGLKVRFVDAGHLLGSSSIEMWISENTAEGVEERKIVFSGDIGPGNRPLIKDPEYPTSADYVVMESTYGDRTHETPPDYAVELARVIRDTFTRGGNLVIPAFSVGRTQEMLYFIRRIKTENLLPEFQNFEVYVDSPLAVEATTIFGKNVQDCFDDTALALVQQGINPIGFPGLRMAITSDESKMINFNDKPKVILSASGMCEAGRIRHHLKHNLWRKDSTILFVGYQVPGTLGNALLNGAKEVKLFGETIEVQAKIENLPGISGHADVNQLTKWVSMFDPKPKRVFIVHGEDKVTEQFAAHIHEELGLEAYAPFSGDAFDLLTGACVAQGSREAVEKKSTRAVNNIFARLVAAGERLMTVIRKCEGMPNRELGKFADQINELCNKWERMYIKWMVPDYGMRGILNGIGRFLFGENDEVHYIGGAEVLPPPLDAGEESVCIRMLATDAAEEARRKLIEHNLRLVVYIAKKFDNTGVGVEDLISIGTIGLIKAINTFNPDKNIKLATYASRCIENEILMYLRRNSKTRLEVSIDEPLNVDWDGNELLLSDILGTDEDVIYRDIETDVERTLLMTAIAGLTGRERMIIELRFGLNTAGGEEKTQKEVADMLGISQSYISRLEKKIMGRLKKEIVRFEMRWLLLGAAVSAVLGLCCILLCRNYLLYCLLMHFLINTLMTVICFGRCDRRQFFENWLAVYLVVLLLGGAFEWLQESGILSKSRGVAIAAAVTVTCGLLRYLGRRRAFGSHVRRAWLGKDARRMALSAYWDSGNQLRDPYTGQPICILSYSLAEKFVDQTKDRIRFVPYRALGAEDGLLAVMDVDEMILQDGRQMRRYEHMAVGIAQKGLLEDKEYDLILHASLGMGENEGGTTLLEIMTTEADTSAKIIVIGVGGAGNNAVNRMIDENIGGVEFIGINTDKQALTLCKAPTLIQIGEKLTKGLGAGAQPEIGEKAAEESMEELSSAVKGADMVFVTCGMGGGTGTGAAPVVAKIAKEQGILTVGVVTKPFKFEAKQRMVNALSGIDRLKESVDTLIVIPNDKLLEIVDRRTTMPDALKKADEVLQQAVQGITDLINLPALINLDFADVSTVMKDKGMAHIGIGNAKGDDKAIEAVKLAVASPLLETTINGATHVIINISGDISLMDANDAASYVQDLAGDNANIIFGAKYDESMTDEATITVIATGLENPGATSKIMPKLNYATQTPNRPVSGSTLGRTTGTAAPTYQPQGGHGTVTPPLPGIQRPRQPESTVQQMDIKIPDFLKNSRKMFKKVKKLVDKLKERIYYIVYEFISGQYGFCTALKDDIQNRRCRKRSTGMIREQRKKKRRRKIGLTVVLILLMLLAIAFLIVWKVFTVENVVVEGNELYSSEQIEQLVLNDEYSWNSLYVLLKYRIKDTGKVPFVDTMEVTLDDPHTVHVLVYEKGILGCFYIDAIGQYAYFDKDGFVVETSSDEIEDVPKITGVTCDEVVLYEKLPLDQPDVLNNLLSLTQILKKYDLLPQEIHYDSSLKPTLTYYGIQVSIGSDDYLSQKIVRLSAILPQLAGMYGTLHLDTWTPDTTDIVFDRDMARRQEKEKKQKPIRYFDYSLLFLIIFLLCFGLVMLYSTSSYYGSTRFGDTAYYLKKQLFATSLGIIAMIIVSRIPYRFWMRVSGLAYLMAFGLCTAVIFIGTEAKGQARWIYIGPLSFQPSEFAKLAVIIFLATIIYKTSKQVGDFKTLVKVMAIVLPVVGVVAYNNLSTAIIILGIAVCMLFVASPKYSHFLIVGGVVLAVGVIFIALASYRAERIQIWLHPEEYEKGYQTLQGLYAIGSGGLFGKGLGESMQKLGFIPEAQNDMIFSVICEELGLFGAICLILLYLLIIWRFMVIANNAADLYGALLVVGIMAHISIQVVLNIAVVTNTIPNTGISLPFVSYGGTSILFLLSEMGLALSVSRGIKFEVTMDLTGKTVLVVGSGISGVAATELLKKKNVNVVLFDGNKELDLTALREKHPVFADVKIILGELTAEDRSGLDLVVLSPGVPTDLPMVEDLKKDGIPIWGEIELACHFAKGRIVAITGTNGKTTTTALCGEIMANYYRDVKVVGNIGIPYTSVAADTTDETVTVAEISSFQLETIHTFHPAVSAILNITPDHLNRHHTMECYIKTKERIAENQTEDEVCVLNYEDEVLRAFGETLHTNVLYFSSRQKLDRGLYLDGEDIYYADGENTTKVINVNELNILGTHNYENVMAATGMALSLGVPMDKIVEVLKRFQAVEHRIEYVTEKRGVKFYNDSKGTNPDAAIKGICAMNRPTLLIGGGYDKQSEYDEWIESFGGKVKLLVLIGQTREKIAACARAHGFENIVLCDTFEEAIDTCYRNAVSGDAVLLSPACASWGMFKNYEERGRIFKEYVRALKEDMTYEIVIPVIVSFAISALLGPIVIPFLRRLKVGQTERKELESHLKKNGTPTMGGLMILASIIITSVFYVKDYPKIVPILFMTVGFGVIGFLDDYLKVVLRRSDGLLAWQKMLCQIVVTTVFAVYMGCYSDVPLTMLIPFSGGKYLDLGWGAFPVLYLAVIGTVNGTNFTDGLDGLASSVTIMVATFFSAVAIGTNAGIAPITCAVVGALLGFLLFNVYPASVFMGDTGSLALGGFVVSAAYMMQMPLFIVIVGLIYLVEVLSVIIQVTYFKKTGGKRIFRMAPIHHHFELGGWSETRVVAVFSITTAILCMIALLGLMSQEHAFYRSKTFNRRKIWLMFLAVFFVLMFLGGRLVYLMVFCSEYYGQKAEDLHERERDIKAARGRIIDATGKILATNKSVCTISVIHSQIDEPEKVIAALQKELGLTEEEVRKRVEKVSSIERVKTNVDKETGDRIRAYGLSGIKVDEDYKRYYPLDTMASTVLGFTGADNQGILGLEVKYDSYLQGTSGKILTLTDARGIEIENAGETRLEPVNGYDLYISMDSNIQQYCEQAAEKAYIKKQADEVSVIVMNPQNGEIMAMVNYPEFNLNEPFTLIEEMGADGTESADKKQELLNRMWRNPCISDTYEPGSTFKIITAAAALEEGVVSLTDQFYCPGYKLVEDRRIRCAKTSGHGAETFETGIMNSCNPVFIELGERLGVENYYKYFKQFGLTQKTGIDLPGEAATIMHKQENVGPVELATISFGQSFQITPIQLVTTVSSIINGGTRITPHFGVEVRETDGTLVETFSYDKREEICSGETSETMQYLLEKVVSEGGGKNAKIEGYAIGGKTATSQTLPRSEHRYISSFLGFAPADDPKVLVIAIINNPKGTYYGGLIAAPVVKEIMENILPYLDKSMAKKKRRPLLKFPRRMQKKLIVMFTIVAGMLIGLIGRLMYIEYTSGEKYEKIVLSQQEYDSKVIPYQRGDIVDAKGTVMATSIAVYNVILDCSVLTSDEDYVAPTIQALVQCFPDLSSDELYGYVRNDPQNRYIVLKKKISYDEMQPFVELQDATDEKGRKVNPDIKGVWFEKEYQREYPYGSLASAVIGFTASGNVGVNGLENYYNSTLNGINGREFGYLNTDNNFEKTIKQATNGNNIVTTIDANIQSVVEDKIREFNEAYTGAYREGDAGASHIGVLIMDPNNGDVLAMANYPNFDLSNPRDLSAYYTEEELAAMDDDAKMDALNQLWQNFCVSYTYEPGSTAKPFTVSAGLETGTVTTADTYYCDGYETISGHDIHCVKRDGHGMETLEQTLMNSCNDALMQMSYKIGRDNFENYQQIFGFGQKTNIDLPGETRTDSLIYTGDNMTVVDLATNAFGQNFNTTMIQLATGFCSIVNGGKFYQPHVVKRITDENGNVVQEIQPTLLRETISESTSETLRQYMYSTVTAGTGATAKVDGYSMGGKTGTAQKAGRDGVNYLVSFIGFAPVDDPQLVIYCVVDEPNAVEQYHSSFAQNIVREILEEVLPYMNIYRDEQTTGIHAGWDITGTDTGATAMTDVVNEETPVEEGLDVPDTTDTLPGNEEEAEGTDTPQDSGDTPQDNGDEPQDSGDTPQDNGDIPQDSGDIPQDNGQQMRNEAAERKYYIDGNTVRRMEAAPAVTRPDRRIRESRPEHVTRERRERERREREREIELRNRKRAARRNQERALRMSKSYVAFLTMAVMVFGIFTGAYIHIQSEMTARMNQISSLESQIADLKADNDEAYKRINTSVDLDSIRNTAMTEYGMSYAKESQIVYYTVNDDDYMNQYSEIPREMEFKHYSVLLEETIEHLNIRPDGIYVDGTLGGAGHASEVAKRLSEKGRLIGIDQDADAIRAAGERLKPFGDKVTIIRSNYANMKEELHAIGIEHVDGIVLDLGVSSFQLDTPERGFTYRDADAPLDMRMDDRQSLTARDIVNDYSEMDLYRIIRDYGEDKFAKNIAKHIVNERQKKPITTAGELSEIIRESIPMKVQKTGGNPAKRTFQAIRIELNHELEVLQDNLDTMIDLLNPGGRICIITFHSLEDRIVKTNFKRNENPCTCPSDFPVCVCGKKSKGRVITRKPVLPGERELAENSRSKSAKLRVFERAMFMGEYNHTVDPKGRLIVPSKFREQLGSEFVVTKGLDGCLFVYPAEEWHNIEDKFRNISMTSKDARKFSRFFFAGAAAVELDKQGRILLPPVLREYANLQKDVVLVGVLSRVEIWDKDRWQENTYDEDEMDEIAEHMADLGFSIMNRIYELQKKIETARHELDEALLQENRFEYYYEKSTRLDKLIEEYLESQEGVRVMRKKSHISLARYMVENLKDEELKRHKFSFYLGSILPDIKPSFLYKRHEMDGTFPYVSRHIRRLSEGDALIRKKKGCKYYRDLGQISHYLADYFTFPHNTIYPGSLKDHCSYEEKLKRDLRSYLKSGEATRHHRLLQLKEEHEKLQNKKKAEPLIDAETICAFIQKSHDEYLAHKHGVEDDIEHIVEVNHKALDAMMKLLANKRAEWRIRHSMTLLDCAVTGCAYNEDRCCCKGNIKVEGSEAVHQNETCCGSFVERGEKNCGCNVKEHESKTIDVACEACNCTFNENKKCSADHIGIAGGNACSCGETECASFCCKMALLEQWQKVAYNEKADRGELQRFWQRYFLLEKGVYEKLLTNPDEKVEGTVKELADKYGLSIMDMTGFLDGINESLVEPNPIDTMEEDTKVSLVFDKEKLYKNMVDAKADWLYELPMWNDIFDPETKKRLYLEQKKSGTVIVGKKVGRNDPCPCGSGKKYKFCCGKMKKRIIASLLTASMLAAALAGCGGSTAQTADTSADAAGEAESAQGDPATVTEKETNVSATADADLSGTTITFWHSMSGVNGEALTALVDRFNEENTYGITVDAEFEGEYDDAINKLKSSMVGGSGPDLIQVYEIGTRFMIDSGWVIPMQELMDANGYDNSNIVPNIAAYYTIDDQLYSMPFNTSTPILYYNKDMFDAAGITEVPTSLEGIDAIADDLVNKGGAGEALSMGIYGWFFEQFICKQGLAYANNDNGRSAAATAVDFDGNGAALSIVSAWKDLYDKGYAPNVGVGGDAGLTDFSAGKAAITLGSTASLKQILNDVNGSFEVGTAYFPGIKDTDQGGVSIGGASLWAIQNQDDVKAQATWKFVEYLVSAESQAYWATQTGYFPVTNDAYNEDVFKQNIEQYPQFQTAIDQLNDTKGEYAGALLSVFPEARQTVQTEIENTLNDKETPEEAVQKMADTINASIEDYNLLNEMDIRLEPRTAAHPKREEIERLHETMKKRELGRKRRRLWSRFGVNLVVSVLVILPLLYALSIAFMPSGELFSMEMNLIPKQPTLDNFAQAFTKIPLFRFILNSFLVAGCITLGQIISCSLAAFALSFLDFKGKNVIFMLIMATMMVPGEATIISNYLTVSGWGWLNSYKVLIIPYITSAMGIFLFRQFYLTFPKSLYEAAKIDGCPNLVFIVRILIPLTKSAIGAMAVYTFINAYNMYMWPLLVTGTEEMRTVQIGISMLNSVDSQSITMVIAGVVMVILPSLFVFILGQKQLIRGMFSGAVKGMNAFVKLRQKISPYLFLVPCLIVFGLFLFYPFAKTIYLSLYKTDKLGQAKLFVGFGNYIDLFTSESFYNSLLVTLIFVVIVVMVSMLLGLVTALLVNKNFPGIRVFSTAYALPMAIASSAAALIFEIMLDPTIGILDKFLRSDINWLHDERYALVCVALLTAWLNSGINYLYFSAGLANIDESIYERASVDGANEWQKFTRLTLPGLSPILFYTVIVNIILAFQSFGQVKILTEGGPGESTNLIVYSIYRDAFFNFRFGGAAAQSVVLFLIVMLLTLLMFRLEKKGVKYMAELALEHVGKVYRNGYEAIHDFSLEIKEGEFLILVGPSGCGKSTLLRMIAGLEDIASGELWVDGEIENYKEPRERNLAMVFQNYALYPNMSVYDNIAFSLSVRKVDKKEIKKKVYDTAKMRVELAALQHAVETTTIYVTHDQTGAMTLGTRIVVMRDGKMQQVDTPANLYAKPVNRFVAGFIGTPSMNFFEAQVVSWEEAPALLVGEYRMMPCREDAAWISRHGSDSVILGIRPENILWEAPESVSAGADYVEAMILEVELLGAEKLLFFLLYGKKYVAKIPAEYDARAGEVRRLYFDVTAIHLFDCDSEMRIMKKMKRILAAAGAILLLLLYASTLVCALSSSENFMNLLMVSIYATVIIPVLLWAYTLIYKLVHKSSEEDADQKEPPQGQGKMSKRGKDTEFDVPAGREEILSFCFKESPHPFVFWNILSVFLLSMKKQKKQFLGMLLVLAVLAAAYGGIHVYNQKQEKKEASEEEAEKLTVVDFKTDDVTAFSYVLGGQVYAYTKTDGEWTWDGDISLTLDTSQIDAMLDAVTGLTAESEITDGEDLVQYGLENPSGIITFTTADGTMTLQLGDKNAVTGQYYLKVAESDKIYLVSRDLSGTFSKTPQELLNEEETEETESVDATEGVDATEGVETAVGVDVTESAASEDSTEEMIAILKREWKSYFQNITGWLFIAAVLALYGLYFLAYNLRAGYPYVSYTLSAISFIMLIAVPILTMRSMAEERHSRTDQLVLTAPVSLGKMIFGKFLAMVGVFTVAVAVIAVTPLVLAAFGTVPLGENYVAVLGFWLYGCTCIAVGMLASALTESQVIAAVVAFAFLFLGYMMNSITGLIGDHLVTKVLGAYDLYTPLQSFMSGCLDLTGVVYFVSVTGLCLFLTCQCVQKRRWSMTTKKLTTGMFSVAMIVVGFAVAVAVNLVVKEMPSSWTAVDATSTKLYSLTDTTKDYVKNLSQDVTIYVLSSEKSADSTLAETLQRYEDLSKHLKVVYKDPAKSPNFYQQYTDSAPSQNSMIVVSDARSRVVDYSDVYEYSYDYSTYSSSVDGYDAEGQLTSALQYVTKADSELPVIYEITGHGENALSGGFSEAVEKANMTVSQLTLLTEDAVPDDAAAIIINGPTSDLSEDDAAKVKDYLQGGGRALIACNFEYQDLPNFASVLEAYGIERVAGIVMENSASACYRSTPYYLLPEIESTAYTSSVTGEYIFAPYSEGLSYPEEAEDITYTPLLVTSDQAVSKTDVANAETSELEDGDFAGPFTIALAAEQDVDDDNTMKLVVFGSTEMLTDNADSIVSGRNVSMFSDVLGQLAGDDGESTGVIPVKEYTLGTITVTSLGTLIGGLAATVILPILLIVTGVVIWAVRRKKMIEINHLVKKYGEHVAVDDLTLTVEPGKIYGFLGPNGAGKSTTMNMITGYLGATSGEVKINGHDIFADPQEAKKCVGYLPEIPPLYTEMTVREYLDFVAELKGLDKKVRKTQTEEIMELTHTKEVSERLIRNLSKGYRQRVGFAQAIMGYPDVIILDEPTVGLDPKQIIEVRELMKELGKKHTVILSSHILTEISAVCDHVFILSKGKLVASDSTEHLLERMSGAQEIALLVKDKEQRMEELLKELPGVAEVSREPGEAAEEVLFHVTAERGEDIREALFHACAKEEIPVLEMHTETKSLEDVFLELTGADGKGEQAMEEIREFCFKEFAVVCLFWNFFVLWYSCNITYHPKEVYAYCDNSFGFVFTELSQNDSLLNTFLSMRTQSVECSKLGKTRIITDVSCGMVRNTGFCGQNLSPHVYLELLSIMIKNVIFDVGQVLVAWEPVEAMRALGMDEETVRAVADATVHTSDWDEADRGALSDEELLTGFIRKAPAYEAQIRNFWEHVNRAIYPFPYVGEWMRTLKDKGYRLYILSNYGAWTYAKTKDQSLGFLKDVDGALFSFEVKQIKPEPEIYHSLLERFHLRAEECVFLDDRQNNVDGAIACGISAIRFTGYEDARQKLKEYGVECMVTAVVGANWGDEGKGKITDMLADEADIVIRFQGGANAGHTIVNNYGKFALHTLPSGVFHSHITNIIGNGVALDIPKVIGELKSITDRNVPAPKLMISDRAQMVMPYHVLFDQYEEERLGKNSFGSTKSGIAPFYSDKYAKIGFQVSELFDEELLKEKVKRTCETKNIMLEHMYHKPLLKEEELLATLHEYRDMVAPYVGDVSLFLDQAIKDGKRILLEGQLGTLKDPDHGIYPMVTSSSTLAAYGAIGAGIPPYEIKKIVTVCKAYSSAVGAGAFVSEIFGDEADELRRRGGDGGEFGATTGRPRRMGWFDCVASKYGCRMQGTTDVAFTVLDVLGYLDEIPVCVGYEIDGEVTTDFPVTAKLEKAKPVLKKLPGWKCDIRGIKKYEDLPENCRKYVEFVEEQIGYPITMVSNGPGREDIIYRSKMDINLEYYKIFYYVAGSQSITLAAEQLTISQPAVSQAVKHLEQALSCPLFVRTTKGVRLTKEGEMLYSYVQRGYETILSGERKLSEMLNLEQGEICIGASDMTLKYFLLPYLEEFHERYPGIRVTVTNAPTPETIRHLCDGRIDFGIVSTPVEKRASLKCIPVKEIRDVFVAGRKFEYLKERMLGYEELMKLPVMCLEGNTSTRTYVEQFLASKQVTIRPEFELATSDMLIQFAVRNLGIASVVRNFAEEHLTEGDLFELRFLEEIPARTFCIVANERIPLSAAAATLMNVLVQGTSQMTKDMTTGSPLRIILLFSIPVLLGNLFQQFYNMVDTIIVGRYLGEEALAAVGSTGCLMFLVLGFANGIAQGFGVMVSHAFGAKDFKLLRHYVALSLILTLIISLLLTIPTVTASRLLLAWMHTPENIIAMADAYIKVIFAGILLTMAYNVLSGILRGIGDSRTPLYFLILSSVLNIILDVVLIVYTGLGTAGAAYATIIAQGVSAVLCFFYMYRKYDILRTRHEDYYLDSAGVKNMLAIGVPMALNYSITAIGTMIMQSAVNVFGSSVVAAFTAASKVSNIATQSMPTLGTAMATYCGQNLGAGKYDRIYAGMRQGLFLCFGAAATAAAICIFGGRFIVSWFVSNPSEEIFSSAMQYLTIASWFFLPLAMIFLYRNALQGLDQGLIPMLSGVIELACRFGVIALVPASTGFFGVCFADPAAWAGAGIPLFITYLLWEHRMKQHHKAAMSKVAIVSDSNSGITQLQAEELGITILPMPFFVGDKTLYEDIDLSQKEFYQMLSENANISTSMPLVGNVTDTWDALLKEYDEIVHIPMSSGLSGSCETALMLAQDYEGKVQVVNNQRISVTQRQSVLDATALAEQGRSAVEIKEILERDKFESSIYIMVDTLYYLKKGGRITPAAAALGTLLKLKPVLQIQGEKLDAFAKARTVKQAKNLMIEAMKHDFAERFHDPEGKSMHLEMAYTYDLDAAEAFRQEVQEAFPGLEIHMDPLSLSVSCHIGPGALAVACSKKIPELEAMSEDFITMTIGKQKNIALIAHDNKKADLIDWCEQNKEILKQHFLCGTGTTARMITDQTGLPVRGYNSGPLGGDQQIGAKIVEGRVDFVIFFSDPLTAQPHDPDVKALLRIAQVYDIPIANNRASADFMIHSTYMNTEYEHEIINFKKNIRERSETLMKLKQKQRLERNKITFILGLIILGLLNALTLLGFVDATADKSVVLARMVVNVILLVIFFVGHVRYRGDRKFVMISLSCMFLTYAVMILSNKNVVFYAFMYLIMLTVMLYRDIRLARISAIAMGALNVISGILHFVKYPGTRSESVVQIVFAISFGVVMCIAVDLQARHHVEDTDAIKSQMDAAARVADEIIQMSGALSEKFDSAREKADVLTESMVSSNNSVKEIASSVKLTAEAIEQQTMQTNGIQTNIENAEKETKEMQTASDATQDALREGADLIAELKEQATQTAEINRATRTTTEELDNRIKEVEVIIGTILSISDQTNLLALNASIEAARAGEAGKGFAVVADEIRKLSEETKESTGKITEIIEKLTVNVEEASVNMQKSAESADKQNEMIETTREKFTVIEDKMNLFQNSMQNLSGEVESILSANTQINDSITNLSATSEEVAASSENSMSMSEDSMQNMENLNDLLGEIYKISERMREVVAQEQAMKILATFDARDYEGTTGIYEKYSIRAIIVRDGRLAMQCSREGEYKIPGGGQEPGENYEQTLIREVKEETGLFVRPKSICELGEIIELHRDIFEPDKKFICHSLFFYCDVLDEQAPLSLTPSEIAKGYQLKWATPEEVYHRNILIEKDSWIIRDTAFVKMLMDGKIRLPGMAKEIKYGTEARTALGAGVDKLANTVRVTLGPKGRNVVLDKSYGAPLITNDGVTIAKEIELEDAFENMGAQLVKEVATKTNDVAGDGTTTATVLAQAMIQEGMKNLEAGANPIVLRRGMKKATDKAVESILAMSSKVKGKDQIAKVAAISAGDEEVGNMVADAMEKVSNDGVITIEESKTMQTELDLVEGMQFDRGYVSAYMCTDMDKMEAVLDDPYILITDKKISNIQEILPLLEQIVQSGARLLIIAEDIEGEALTTLIVNKLRGTFNVVAVKAPGYGDRRKAMLEDIAILTGGQVISSDLGLELKDTTMDQLGRAKSVKVQKENTVIVDGAGNKDAIQARIHQIRGQIEETTSEFDKEKLQERLAKLAGGVAVIRVGAATETEMKEAKLRMEDALNATRAAVEEGIIAGGGSAYIHATKDVAALADTLEGDEKTGAKVILKALEAPLYYISANAGLEGAVIINKVKESPAGVGFNAATEQYVDMVEQGILDPVKVTRTALQNATSVASTLLTTESVVANIKEDAPAMPAGGAGGMGMMMKLVPLSDRVVLKQCEAEETTKSGIILTSSAQEKPQEAEVIAVGPGGMVDGKEVTMQVKTGQKVIYSQYAGTKAKLDGEEYIIVRQSDILAVVEMANMMDYLDWRGDLTFTASGFNEVDNLLFAELVYTSFDGIVTGQSEAEAVTLAEASAVFWEQNSREEILARVSMTKAAPFVLEKMAKTERFRDVKLWGYVNDISEEEQSQFAVMCAGLPDGSIYVSFRGTDNTITGWREDFNMGYLSETPGQLKAVSYVEQMLGEGGRPVRIGGHSKGGNLAVYAAVHCSNGLQDRILAVYSNDGPGFRRDIVESAAYQRVLPKIHTILPESSIVGMLLEHQEAYEVVRSSNSGIQQHDAMSWEVLGTSFVYVREVAVQSLMLDETMKAWIYQLNGEEREQIVDTVFGMLEAADIKTVDDFYHSKWKAVQELMKAKSRLPEKSQKVFAKALKLLWSEGNKTVRKTVKQVVGEKRRMKKAVFFDIDGTLWNEHMQVPESTTEAIRELRADGNYAFLCSGRSRSNIRSEKILGIGFDGIVAACGTHIEYEGKKVCERLLTPEEAEELLRVIEAYHMEAVLEGPHYIYANGEDFKEDPFIQYLRSELGEDVREIRGQTEYEINKLSAYMNGASVRAVEAELVPHFDVIEHNPQLIEVVPKGYTKATGIAQVCDMLGIARENTYAFGDSTNDLEMLTYVGHGIAMGNGAPAAKAAAEYVTTDIMNHGIKNGLKHYGLIGMYADENVIKIKHDVLYEVAKLAFAGELDEKRDNIAMSLIPGPTPQFRCCIYKEREIIRQRVRLAEGKAPGLTDDGNVIQVISSACEDCPISSYIVTENCQNCLGKACINACKFGAIEPGRTRSHIDPAKCKECGRCAQACPYNAIAHLKRPCKFSCPVNAITYDEHGISVIDKKKCIRCGKCIHSCPFGAIGSKSFIVDVINALREGKHVYAMAAPATEGQFGDDITMASWKNAMKELGFTDFFDVGLGGDMTAAYESEEWAEAYKAGEKKVTSCCPAFVNMVRLHYPDLADCVSTTVSPMCAVSRLIKARDPEAVTVFIGPCIAKKSEVVDQQIPGNADYVLTYSEIRAIMKAKSVVLQPAANDDQIASTFGKRFANSGGVTAAVLQSLKESEDEIDAKVCVANGAAECKKALLLLKAARLPEDFIEGMACEGGCVGGPSAFNDQISSKKNRDTLISQADDRGIHENIEHYEMNTISMHREMNGKHAIYRVYQALCAGMLRLFPAGRQTLVQGDGCITRIPEVLKTHGIKAVQIITTPGTIRRGTIAPLLAQCEDAGIRTVLYTEVSPDPTVAEVEAAAECFFVSGCEAILAIGGGSVMDCAKVAGARTVRRDLPVRKMSGMLKIHKKLPLLLAVPTTAGTGSEVTLAAVITDETCHYKHAIMDYCLIPRYAFLDPGLSGSLPPDMTAYSGMDALTHAVEAYCNRFCSPKMKVHAKKAVRLIGANLLTAYREPANKAARMNMLTGSYEAGIAFTNAYVGYVHAIAHGIGGLYHVPHGEANAILLPKVLAAYGSAVHEPLARLEREVRASGGKTERKVRAAGVELEREVRAAGAELEREVRAAGAEDGSREETDAVLAEAFIERIRRMNRSMGIPEQLVMLRKEDVPELSARALKEGNPNYPVPVIWEEEQMRAFLMEQVPKMEEQMARRLVAAEGKKLQQAGLVARTWGNISCRIDENHFVITPSGLDYETMTAVDLVLMDIRNGVCCGAHKPSSEKGVHLAAYQTFPEVGYVIHTHQTYATAIGLCGFEQLAMTEEEAEKLGGIARAAYGLSSTEKLAGAVYDAMQSGAKVVFMVHHGVLICGKDREEAFSRAMLLEEICKRSILGQPKKKPRKDQKRQEKLLHVLQKHFHYVGICDTPAVLLCAASGRGIPAQVDDMAQMIGRKIPCCLHVRRDMLGLLRKYGAVLVPRVGVVVSAGTADDVEALRALVAKAAVCCLHVRATGASASLSPVNVAIQHHHYVKKYALQKDGEAMEEIMLNREVNPKEIIPEEENQEGAKIFGKLAGASLLYALVYTGCMFENVMGLASVLWVAASVWYVRFVFRMFGEKERRDNGIVLGMMVLLGISTVLTGNEWIGWMNDLIIFVLLVGILLHNFAQDTGWNFGKYLAEIVAAVCGAVCFIGKPFADGGAFYRSKKTRESHAGWYVLIGICAAVPCLMVLVLLLMSADMVFADLLVRFAGVFRFPVKLLRILLMLVFGFLSSYCGVRYVQKHAADIKPSAGKTAEPLIAIAFTAPIAVLYLLFSAIQIVYLFIGNMQLPAGVTYAEYARRGFFQLLFVCVLNLAAVLSIQSYFKENRVLKALLLAISGCTLIMTASSACRMLLYIRAYQLTFLRVSVLVALAVIALLMAGVIAKIVKPQFPLFRYGFVLAGAVYLVFAFSHVDYFIAAYNLTHTSWEASGEETVDYSYLYTLSTDAAPAIEKYAGKSGAADYRKQGWYQLYCEANEEALNETGLRTYNVSHAVAKQLLMEDNREMAIRINIDVMLAKRKMSVTELSEKVGITMANISILKNGKAKAIRMDTLDKICRSLGCQPGDILEYVEEEGEEKGDGRDHAMSQKQVAGWLKGITLSIAGMGLLFFGLVVPYLAWDMAVTYPDYAALRIPGILYGWGIAVFCYAILYQFWKVCVQIGRDNSFSGENARSFVVISRLAFVLAVVWFAGILFLAAKRALGPAFLIFMILLIFINVVIAVLAAALSHLIYKSYEMKQDAELTIMGHIQTQEEWEVQMAEKILSYVRNELYLELRYLDVAFSALVPQADASLQSFATDGGHLFYSTEQILRVFEKNAPYLNRAYLHTVLHCIFSHPWIAGNRDRRLWNLACDVAVEYTIDGLGKKCTKRILSWTRQKLYEELREQKKGVSAAVVYDLLWERYFPLPAEGMPVCEEWQALAREFYTDSHKYWPKREDDAAKCAAAADNQKKWNQIARQTRMEQERRGEKPKDGEDLLAAQLAAGKSRRSYRDFLQKFAVLHEELHADPEEFDLSYYTYGLSVYGNLPLIEPLESREVKKIREFVIVIDTSYSTSGELVEQFLRETANILHQSDSFFARSVIRVLQCDNVVRSDAKITGEQEMEAFLRDFTLLGGGGTDFRPAFSYVNDLLEQGELKELAGLLYFTDGKGRYPAKRPDYRTAFLFLEDYDEAAVPPWAMRLLLEKEEFLNMNYKLYWELTNEGDARLLRAFGETPEPRFLAEIEGRAITEIGDYCFAAQAHLPAECRCSYVQEETEADGAPETAPDGEMQAEPGADGVPETAPDREADVMPGADGAPGAEPGADGALAELAGAYITRVTLPEGIKKIGNFAFYNATELAELELGSGIDTLGSDAFMNCRSLSRLLLHADPGQKTGLRLLLAQLSSDLEVALSGENGVWAKLLFPEYYESYDEIAPAHIFGRNIVGEGFRARQSFREDVLDFAQYDKIFPQACVDESEATLGRLALDRVRYAAELSEAPRGLYEEYLKAHSGYLIRRITDDRDLELAEDCCSRKFLTREDVAACAMRAGEADWAEGAAALLHLMQQYFAEKTPDERYSFDDFMVSYMQLALKRAGYPLLVDGIFGTDTCRALADFLQTDRTPDRICVVDRSAWEKLLPYLRGYTTEEGENRILFEDPVTSVEVPYTSLLTAAVIDGILARYPFLKSGEIGKSVMGKPISYLEIGNGEKEVFYNASFHANESITTPVLLKFAEEYAQAYEKGTALYGVPAAELFEEYRLFLVPLVNPDGVDLVNGLLTDGGYYRRAQQIASDYPAIPFPSGWKANIEGIDLNLQFPAGWENAKRIKYAQGYTKPAPRDYVGEAPLTAPESEAVYAFTRSHDFRLILAYHTQGEVIYWKYLDYEPAHSYEIAQYFGRVSGYTVEETPTQSGYAGYKDWFIQEYDRPGYTIEAGMGENPLPMSDFAGIYRDNAGILLGGMTQIMHELGIIVHIAKTLDQVAAENELKKIGSVTLDIGEVSGIVPEYLTECWEFYRKKNPLIAECEMKIESLPAVTICEDCQKTYETVTYGRQCPHCGSYETYLVTGNECSIKEIEACMAEERELILKLGKKITDRIPYKLGMEKLTVNDPEYWGLAGVVTDEMAEVALCMDVRKPITLPKLAKKTKKPEAELEKLLQEMAVVGIIEYNWENPQHEKQYILPMYVPGSAEFMVMNKEQVEKHTEVADFFENMSRLPLEKVTPMVPLGGAGIGMHVIPVEKAIPAAQESADVEHISHWLKKYKDKYAIGQCSCRLQQRVRDEGTGDIEGEWCIGVGDMADFLVQTGRGHYVELDDVLELLERAEKMGYVHQITNIDGEDKIFAICNCAVGVCNALRTSQLFNTPNMSRSAYRAHVTKENCVACGRCVEYCPTGAAKLGQKLCTKNGEITYPKQELPDATKWGPEKWSTDYRDKNQINCYETGTAPCKTACPAHVPVQGYVKMAAEGRYMDALKLIKNENPFPAVCGSICNRRCEDACTRGTIDQAVAIDEIKKFIAEQEMHADKRYIPEIVNHLGTGVDLPQKIAIVGGGPAGLSAAFYCRKMGYPVTVFEKESRPGGMLLNGIPSFRLEKNIIDAEIEVLRQMGVTFKCGVEVGKDVTIQQLREEGFKAFYVAIGAQGGRKAGVPGEDADGVKTGVEFLRSVNLDESTKLSGRTVVVGGGNVAVDVARAALRAGSGEVSMFCLESRDIMPAAKDEVAEAEEEGISVNNSWGPKEILTENGKVKAIVFKKCLSVKDADGRFNPQYDENDLMTVECENVLLSIGQSIVWGDLLKGTKVEIRPNGGAIADPVTYQTAEPDIFVGGDVYTGPRFAIDAIAAGKEGFVSMHRFVNPGQSLTLGRNRREFIELDKNNIDVETFDNAKRQIPGTKAGVAKETFRDLRCTLTEEQIKTEAKRCLGCGASVVDENKCIGCGICTTKCEFDAIHLTRDLPDASRMWKSEDKLKAIAPYALKRQFAIKRNKNMSEFKVIEIKKNILEDNDREADVLRSELKADRTFLLNLMSSPGSGKTTTLVRTIGALKDEMRIGVMEADIDSDVDADTIAQTGAKAIQIHTGGMCHLDADMTRQGIESLETKDVDLAILENVGNLVCPAEFDTGAVKNAMILSVPEGDDKPLKYPLMFSICDVLLINKIDVLPYFDFDIEACKERVKKLNPNIQIIPISSRTGEGMDAWYDWLRTEVKQWNNMYALSKAQAGDICTIKWMFGLPEAVDFLRQHHVEEGETIQVIRKLRDSLIIGVQNERVALGKEIADRIQVMDIKLNPIFRETYTLGDVGVKEKGYTSRKPAWDATPARQYVRSGALRRARRTGFIGIIASVAGTAVRTVPRTRLSENEKKRLVVHITKKMENIVYNELLVRGYNVDVGIVDVFAKNSEGKRVHKQLEVDFVVNQGSQRYYIQVAYDMTSEEKQTQELNSLRNIPDSFKKIIIVNGTKKPWRNEEGFVIMGMKYFLLNADSLGFMEIFQYLFLLIFSNRSMYMNLITRRNTPDFAKDTVYRFMKMIQINWIRFTTILSTRIIKDAILPLNSEDRANVLIIDDCQTELQTAGADSYYGEHCLMKEQRIKLIGKLLHQQGNTARAFVQYMDSDREYTAGDKLYMREAHFVIAIGPGEGRTMSEIAREMNVTQGAVSQIASRLEKKGYVCRRKNEENKRQIIAFLTEKGEQFYTEHQRYDESMHRQMDEIALNRFNEEELQCIFEYEQIMEMLLKEEALTRHLTEKSKNMLTNEIIRLQAEAQQDYVIESRRTIHRFAEVSGKEFKTSAFIEEEIKKAGLPYEKAGDTGWIAILDTGKPGSRIALRADIDALLVPEEPNNLAGPRVVVSDDPHTSHACGHDAHTAMLLGAMRVLAEQRDNLTGVIYFCFEEGEEDGRGILAMLNQLSAHGVDVCWGIHVYAGLESGKICVSAGPRMAGAAGVGIKVIGRGGHGSRPDMSVNPVFCAASILTNTATAWVNQITAGRTVTLGVTSIQGGEAPNVIPDTADILGSLRFFNDEEGEKAVRIFKNVAEHTAAMNNCQVQFDDRFCVLCAPVINDEYYSNLISTALPEVLPENVTVSSCEPWYASESFSCYRRICPSVLAHLGINNPSYGSGAAHHNGFFDVDEGVLSTGVISTLKFVAMLQKMSVDFNREVDRRSTSDVKWRPEGLKGYLPIEVSENEIPMWIADMDFACPECIVRAIKERADKEIFGYCSYKQEYYDALTWWFDKRFGMKIHTDLVSMMPTVVSAINVAIRAFSNPGDKVIIQQPVYDPFAELIKKTGRVMVNNGLICNDGLYEMDFPLLEEQAADPDAKIMILCSPHNPVGRVWTKEELARVGEICKKNNVLVIADEIHSDLVYAGYVHTPFALASDAPHLVCTSLGKTFNVAGLRLANIFSSSAELKKQYDQEIDAYSYSASNTFGLEMVQAAYSPEGEAWLEELLVYLQGNVEVVSEWCQKHNVGFTAPQGTFLCWLDLGSAGLTDEEIIKKIIMGKEVICVPGPWFGKGGEGHLRLNIGCTRKTLVEALDRIASVLNNMANKEIKTEQAPAAIGPYSQGISAENIAFVSGQLPIDPATGEFAGNDIASQTRQSLKNVQAILAENGMTMADVTKTTVLLADIAEFAEMNQVYAEFFAEPFPARAAFEVAALPKNAKVEIEAIAVKRMGKFEKDTGTGRFFKDFKKYHGLPVQDAIFFNQSDLICDMAKHEDFIVMGRCADVVLTNHHIPHISIFITASFDQSVRRMMEINSLNYKQAEHLLKKLDKRHERYYHAYTGKKWGDAVNYDLCIDSASYGIKESVELIERMINKYPNSMNHNIQTFKTSQHPVYTFSRKVFTEGMRDGFPIALGYFAVSFSLGIATRNAGLNPLQGFLASLLNNASAGEYAAFTLIAANATYLEVAIITLISNARYLLMSCALAQRFSEDTPFIHRLFIAYDVTDKLFGITIARPGYLNPFSFKWNKDHSFDGDPVFCCCDPIPSHPGKRMTHNPYFYIAVMALVSYATRVLPLTLIRKPIKNQFIQSFLYSVPYITLSVMTFPAIIEATQSPVAGAIALVFGMIGAWFGASLFQVSVGCCTVVLILELILVMVQYYNTGDKDSTNLIAYASDLSMFAMLFTDMQNGTRDYGNDRPIKSVEVAILSTIEQNPGITVSDLSQKQHRTKGTISSIVSNLEKGGYIYREKRPGNAKVVHLYTTPDGERLNTLYIAFVTKKTTEIQSELLKVCSISEMNSFCKVLHEYVKLLSKAFDEESMTQKSKSSKVVTLILMILAMNTIYMLPYLMYTYYTPLQEAMGLIGRDADYGRLLNVYGIANVILYLPGGWVADKFDCKKLLIFSMVSTGVLGIWEATFPSYTILLLIHVLFAVTTVLTFWSSSVKCVNMLADDGEQGGMFGSLEAGRGVSGLVLTVIFTSIYAANAADSTKAMRINVLLISIVMIVIGVLLAFLMPKPKNTEAATNDTLLDSIKAMGVAFKCPITYLLAGMIFCGSMCLASTTYFAPYLQNICGLPVKIGVLYSNYSKIVTQLIAASAAGILATKLKRSTKPMIVAGVVGAGLYIVMEILPASTAVMWPMLVVMTVALMMIYVFRALYYATVDEEGTPKNIVGSVIGISSLIGFIPDTFYTSLCGKWLEADPVGGYKKIFLSCILAMVIGLVCAFISDRRIVKFRAANNKEAMNIFFIGVVVSILVYIVVGIWAGRSVKDVNDYYVSGRNAPTILIAGTLFASMLSVNGFMGDQGWCYSGNITTLVLLNSMCAMGYIAGPLMFGRYLRRSECTTMPEYFGARYCDLKNRRVAGIITAVSLTAYLLSCITGVGILMQELTGLSYELCLFLAWFCFTAFTFYSGSKGVILTDTMMFMVFLIATIIAGPYVFKAQGGIGHLLENLMNNPNIPENLLDYHGNIPGAGATDVFGAVMYAVTMGIIWFITVSVSPWQAGRNMMAKSEHVTFRAGAIAAACTVIFLMYLNLQSVTVLNLNPGMEDPQRVLIWAAFHVMPKLVGTLMLAGIMAAGLSSASTFLSVIGFSITSDIVFVEFKSEKQQLFVSRVIMLILGAISLLLAYTGIGSVRIVTYFASTIIAASWGVSAIGSVVSKKLSATGARWSMIAGFVGFIVTKCLVGFHVGLFATVFINFLDPFFIGIYLSLFFAILGSKLHPVTEEEKAYREKLLILPESEKVIKDYKIDKVFGYLLIAAGIAVTLFLLFGWALPYNGIIMEDDTMGEILFSAVVGGCLIASGILMIFVLGKEEKKVRKDKEDVAMEFKLNEDQQLMKDMFVEFTEQFVKPIAAELDEQERFPEELIPQLGETGLLGIPVAEEYGGAGADNMSYVLAVEEVSKACASTGVTISAHTSLCCWPIEAFGTEEQKQKYLPDLASGEKLGAFGLTEPGAGSDAAGQRTVAEDKGDHYLLNGSKIFITNGEVADVYVVFAMTNKELGNKGISAFIVEKGWEGFSFGSHEKKMGIRGSSTCELIFENVKVPKENLLGEVNKGFKIAMATLDGGRIGIAAQALGIAEGALDAAVEYVKTREQFGRPIAAFQNTKFTLADMKTRVEAARYLVYSAACAKDNGEPYSDKAAMAKLFASETAREVTWRAVQLFGGYGYTRDYPVERMMRDAKITEIYEGTSEIQKMVIAGNLLKMAVEKTKDLWVFIETEDEGTAKSVGLELLVPGRRLADKQNGKLVAVILGSNVAPALEAVKAHGADEAIVVDQPELKHYNTDAYAKVLCELIEKYGPSVMLIGATNNGRDIGPRISCRLGTGLTADCTALDIDDETGNMAWTRPAFGGNLMATIMCPDHRPQLGTVRPGVFKKSEPGEVKDIPVIKEKVEITDAEKRVELLEVINEMAGELVDLENAEIIVSGGRGVGGPEGFAPVRELAEVLGATVGASRAAVDAGWIPHAHQVGQTGKTVGPKIYIACGISGAIQHLAGMSSSDVIIAINKDPDAPIFNVADYGLVGDLKVVLPILTEKIRKYKGLMKNILVCIKQVPDTTEIRIDPVKKTLIREGVPSIVNPFDAYALELAARIKDKEPGTKITLVSMGPPQAENALRECLAVGGDKAYLVSGREFGGSDTLATSYILSCAIKKLEELEGKFDIIFCGKQAIDGDTAQVGPEIAEHIGLPQVTYAIEAEAEEDRLVIKKEVEAGFEKVAVSYPCLITVTKPSFDPRFPTIKSKMAAKKAEINVLAYADLEAGMDNERIGLKGSPTKVKKTFTPEVKTSGVKINEPTSEEGAEKLFAILCEDKVFMDFRITEEQELMVQAIEEAMTRENLEPYFQDCDKNHTHPEKWWEILKELGCFSMFLPEEAEGEDGEPGGGEGAVTMFLVMEALGRCGAPIYLFWDHVKADALLENGTKEQIDKFMPLFFKGNGAFAQGFSEPTAGTELSSNTILTTYTRRNGKVYINGHKHFISGAQDNDYCLTLAKNSENPEQLTLWFVPTNVPGCKKEPMEKMGLNMENVNDIWFDDVEIEESDMFSFEGNGLMATSKGFDYERLIDAFNAYGQALCAYEDACRYANQRIVKGQEIGRLQLIQNHIMEMTMKIEAMRNMLLHYAWNKDNNCLTRAEASIAKQFCSESANDIADHALQVMGGIGYCGSRVSRIYRDLRITRISGGTGEIQTVIASRQVLKKYKMGETKKVLTELKNGVLIVTINREERRNAIDPETSAMMEQILNDAEQNPEVGAIIITGTGDRSFCSGEDLAAYDENGTCQTIMAHGFAGITERLSAKPIICAANGTAVAGGLEIALACDIIVASENARFGLSEVKVGFLATSGGLIRLPNIIPKKIASEMVLTGKLIDAQRAYEVGLVNYVVPREQVMDKAMELAEIIAANAPISLKLSKEIFHVATQCSFEDAQRYCNRCWDYIEKTEDAVEGPKAFLEKRKPDWKGRMQIIRVPVGAFITNCYIAEGQEPGRGFLVDPADNPKKLISILEEKQICPEAILLTHGHYDHILAVPKLQERWKEIPVYCNAKDIPESLTEYDMGQQFPTVRAFKNVKTIEDGQELVIAGTEITVMETPGHTPGSVLFLTKDAIFTGDTIFQGSIGRTDFEGGNERQMMQSLRKINNLAIEDITLCPGHGDTTTLKWERAHNSYLKMCRMGTENRKGPLKDVKVLDFTIALAGVYVAWQFADMGAEVWKVERYGSGDQARTWDPFVNGLSTLYTAYNKNKQSIELDLSSQEGKQVIYDMVKEADVVLENFKSGSIDRLGLGYEELKKINPKIVFVSLSGFGATGPLKKYPCYDAIAAARGGFAGSNGEPDGAPMKAGNANCDTLTGTHALNAALIGLIQARKTGEGCRVDIGMMDTVMISCGETVVDYGKGTYTQSRFGNHDRFTAPYGIFEARDGWAVIIADSEERWAKMCDALDAGHLKDDPRFADNAARIANRDSLVEELEKVTVTYKRSEIEKRLTEAGVPASEVLPFIEAYTSEHANSTETTTLVDQEKIGQMRFYNNPIRFNDELCPIWRGAPLLGEDSREILAGLGYSEEKIDQLFADGVVGSSMIMKPLEAVSVLDLTEGNPYIGSVFADYGATVLKVEKPQGGDDIRRRGGTPEEEGPYAQYYLRGKKSIAIDYTTADGQEIVRKLAAKCDMVAVNKQEDYMERLGLGYENLKAVNPKLIYGVLTPFGKEGPWKDCPDYDLIVMAKCGLLEKTGFPERPTKFGFPLAYIYASWHLTAGMMAAYLKAEESGEGSKVSVSSWHTMMELDDTFAECMQGLNVLPRRLGNGFPTTNPTDTFHCKDGWFALSIGSDKQWLDFAREAGRDDWGEGSVYAHDPDRSMKHYFGELDQQLKDYFATISIDEADQICRRAMVPGGPCNTVEELMKDEQVADRGMMITVGGETQIGIPAKFSGADDLDNIEPGHVLGADTQAVLTEYGVEMKIITCCKVVPDEEQIKVLPNRELALDDVPAKISQYDLNALEAAKKLSAETKGSVTALSVGSSKALDATKIRKDILSRGANDLKLVISDDHSFSDSFETAKALAAAIREQEEVDLVLCGTGSSDLYNQVTGIQLGTLLDWPTLNNVTSIQPNGDTVLVERTLENSTEVFEVALPAVLSVSSEINVPTVPAMRDIMQAGKKPVAVLTTDLADLNASASTLEQLAPEQQERRQEIIEGDNEEAVDALVAFLKKEALMQSYVISENNALLSELCAGARNVASDVTAVVFGDGAAAAECGADHILTCPLEESGSPEDFAKAIAEEILKSDAACVLVGNTILGRALAGKLSVYLNTAVFATISSLTSEDGKPCFERTVFGGTAVNKQVIETAYSVFTVNSGIFAAAEGTGACTDIAPIAGAASASLKRVSKDEKRETAVNLVAAKRIVDVGRGLAAQEDLAMCEKLASAIDGEVGCSRPIAENNKWLPKSSYMGITGVQVKPDLIICTGVSGQVQHIGGINKSKVIVAINKDKSAPIFKNCDFGLVGDMYKIIPLLTEKLSMTDIAGNRTLSSQWNETVQFYGNQNFLEYISVDDQLTSYTYSEFHYRVIQTANWFHSLGIRKGELVALHLHNSPEYLMCWLALAQIGAVSVPLNEHYRLQESKFVLQKCDIHRIIVEPSSLPIYQSNKEDLLLSTIILAWGECPDPDILSLSASSFFDGSRLDESCEILPEDTAVILFTSGTTQYPKGVIYTHCNVVYGGIIHMQQIGMCPGDRFLSCMPCYHMDFQEMAAMSVIVAGGTLIMVEHYSAHKFWKQICDTKANFTDTMSIMNRTLMLQPVQPWEQDHCLKQVYFSMGLSTEEKDEFERRFHVQLLNSYGMTETISAVTCSPISGDKNWPSVGRAALSYDIKIIDCDGKEVAPGKTGEICVHGIPGRSLTPGYYNDPGATECLLDKDGWLHSGDRGYIDEAGWLFFIDRWGNMIKRSGENISSLEVECVLTSHPKIADAAVIGIPDPIRNQAVKAFIQFADGESLTIAELEQYCSDRLSKFKVPTFWQFVDDFPRTATGKIKKKELKMKYDFTSILNRDGMDAIAVNPPMNASWISFAPIKEGFDLIPMWVADMNFPTVPTIQDAIIERTKHPAFGYFRPRPEYFESIINWHKLRNGVTGLSEEHIGYENGVLGGVISALSVLCSKGDSVLFHSPTYIGFTASLTNNGYNMVLSPLVRDENGVWRMDYEDMERKIKENHIHAAVFCTPHNPTGRVWERWEIERAMELFQKYDVFVISDEIWSDLILNGHKHIPTQSVSEDAKNRTIALYAPSKTFNLAGLIGSYHIIYNSWLKDRIDKESSLCHYNDMNVLSMHALIGAYKPEGHEWVDELCEVLTENVNIAYDFFSNIDGIDTAKPEGTYMLFLDCKGWCTAHNQTLEDLYKKGQSVGVYWQDGRPFHNEYGIRVNLALPKSRVEEALNRLRNYVFCDMGEFRVTINPKNKPATPEVNWQQARVLEMQAEYAAAFDTQAGTYEEMRAAYREERKMWNSGGPEMAETIDFEIPFGEDKVPARLLRPVKAEKLPVIFFMHGGGFVLGDNDTHNLVQRKLAAYSGCVVVGIEYTLSPEVVYPRAIEECTTACKYVLEHAEEYGIDPEKFGFAGDSGGANLSMGVTMHLRDDGFDISRIKGNILFYGSYGMKASVSSNLHGGSWDGMSEEDLAFYLEIYLGEGVDPIDCPYFDTFINDLTHDVPPCFIVSAELDPLRDDSKLLYEILTNNGIQAEYHEYKGALHAFIHYSKVMDDAEDALRRGAHFFAHNCGLDPRNMVSANTLCKNVLNVKNTVIENFNLYSDEDGVKHIRIKARHHFYIKYSFHYFIGFGYQNRKDIVFIFLIKKTNEGNGFGMNPINKPAAPAVGWQQARVLEMQAEYADAFDTQTGSYDEMCAAYGEERKMWNSGGPEMEETIEYQIPYEGYTVPVRLLRPVKAEKLPVIFFMHGGGFVEGDNDTHGLVQRKLAAYSGCVVIGIDYFLVPEVRYPVAIEECVAVCKYVNTINLHLHIEKTIWFPLMYMGEIKLQINPKNRPAVPAVNWQQARVLEMQEEYAAAFDTSLVNTIEEMRAAYNEERKMWNTGGPVMAETVDFDVPYEGDKVPVRLLRPVKAEKLPVIFFMHGGGFVEGNNDTHSMAQRKLAAYSGCVVIGIDYSLAPEIKYPRAIKECVAVCHYVSEHADEYGIDPEKIGFAGDSGGANMAMGVCMCLRDEGFDVSKIKGNILYYGGYGLMSSISSYQHGGKWDGMSEADLSSPSCYIAPDVNRFDCPYFHIYANDLTHDVPPCFLVAAELDPLRDDSKLLYEILTNNGIQAEYHEYKGALHAFIHYSKVMDDAEDALRRGAHFFAHNCGLDPRNEMKAIRIERMHAPTSRSVDMRYPRKGTTGSIHNKPDVCFNSTDFYVGFIGSKDFSCIVIVVVYEWFDADSNCLTEVSYLLVGYVNVVKFFMFDKLDDLLIRFEELMSELSEPDVANNPERFRKLMKEQSDLAPIVAAYKEYKQCKQNIADSLAMLDEESDEEMRELAKEELNDAKARVEELEHELKILLLPKDPNDDKNVIVEIRAGAGGDEAALFAAEIYRMYQHYAESKNWKTEIVEADETGIGGMKSVTFMINGQGAYSLMKYESGVHRVQRVPETESGGRIHTSTISVAVMPEVDDDIDIVIDEKDIRIDVMRASGNGGQCVNTTDSAVRLTHYPSGIVVYSQTEKSQIQNKAKAFALLKAKLYDIEQQQRHDAEAEMRRSQIGTGDRSEKIRTYNFPQGRVTDHRINLTLYKLDKIMNGDIQEIIDACIAADQAAKLAKMNENMTYRETVNLGETVLSMADIAEAKTDAWLLLEMVCKIDRSFYYLHMEEDMPEEQMSEYQIALRKRAEHVPLQYIVGETEFMGLKFKVNSSVLIPRQDTETLVEEALKVVRPGMRVLDLCTGSGCVIVSILHNVSDVEGYAVDISKQALNVAKENARLNDVPVLFEHSDLFDHVTGTFDVIVSNPPYICTDEIAKLMPEVRDFEPMEALDGKEDGLYFYRKIIGQCKQYLNPEGHLLFEIGYDQGQKVSALMREIGFHDVQVIKDLARKDRVVTGMLMRYSGIGGQAVMEGVMMKNQEKYAVAVRKPDQEIVVETSTYEGLIKNKKIRNMPILRGVFSFIESLVLGMKTLTFSASFFEEEEDEKSGSRKAEKRAGAKKPAPTEEEQKKKEKRQENVLMGGTVAISIVLAVAIFMVLPYYISVFFQRFITSQTLLALLEGVIRLTIFIGYVAAISLMPDIKRVYMYHGAEHKCINCIEQGMDLTVENVRKSSRLHKRCGTSFLLIVMLISIVFFLFIRVDNRILQLLLRLVLIPVIAGVSYEFIRLAGRSDHMLVNLFSKPGLLLQRITTREPDDSMIEVGIASVEAVFDWKAYVKEIREQAMKAGIHPDYYQATVTCNCGNTFVTGSTKEDIHVEICSKCHPFYTGQQKAAQARGRIDKFNKKYGMQQQMREKYESLSAVVLRDLAKARGLKNISGMKKSDLVDLMVAEDERQGREENTKQREQTPQREQTPQREQAQREQIPQREQAQQRPAREPRETREGKGESTAADETISNLDSGIMANGILEVMPDGYGFIRCENYLPGENDVYVSPSQIRKFNLKTGDIVAGNTRVKTQQEKFSALLYVSSVNGYHPSVAQKRKNFEDLTPIFPNRRIRLERPGCSVAMRIVDLVSPIGKGQRGMIVSQPKAGKTTLLKEIAKSVTKGNPDMHLIILLIDERPEEVTDIKEAIVGENVEVIYSTFDELPEHHKRVSEMVIERAKRLVEHGKDVMILLDSITRLARAYNLTVPPSGRTLSGGLDPAALHMPKRFFGAARNMREGGSLTILATALVDTGSKMDDVVFEEFKGTGNMELVLDRKLSEKRVFPAIDIVKSGTRRDDLLLEPEEQEAVEIMRKAINGMRTDEAVENILNMFARTRNNQEYIHMVKKNRIVMENQTMTLAEKALLMHEKWNGKLETIAKSKVNSREDLAIAYTPGVAEPCKMIAKDPEAAYKYTMKANTVAVISDGSAVLGLGNIGAYAAMPVMEGKCVLFKEFGDVNAVPICLDTQDTEEIITTIKNIAPAYGGINLEDISAPRCFEIEERLKEMLNIPVFHDDQHGTAIVVLAGIINGLRVTGKKKEDCRVVVNGAGSAGVAITKLLLTYGFRHVTMCDREGIIGKDYPNLNWMQQKMTEVTNLENQNGTLADALKGADIFVGVSAPNIVTPEMVASMNHDSILFAMANPVPEIMPDVAKAAGARIVGTGRSDFPNQVNNVVAFPGIFKGALEGRATQITEEMKLAAAEAIAGLVSDEELNDEFIMPEAFDPRVAQVVSEAVRSHIVRMNDARYYSLNTYLRQTFGEKVYRLSLNGGMTCPNRDGSIGTGGCIFCSAGGSGDFAASPQQSVTGQIAQAKLLLREKTNCRKYIAYFQAYTNTYAPVGVLRALYTEALAQPDIVALSIATRCDCLPPDVLDLLAELNTIKPVWVELGLQTIHEHTLRFIRSGFSLAQYEQAVSALHARGIKVITHLILGLPGETTDDMRASVRYLAAHPVFGVKLQLLHVLEGTDLGTLYKNDPFPLFTLEEYCDLIADCLALLPPEMVIHRLTGDGPRRLLLAPQWSTDKKRVLNTIHRQLAGRDLWQGKYYRNEEFHGMAEPFTIYKLTILNMLDKVDFPLTNTQISDFFLEQEYTDYFRVQQVLNDLADSGLIRTESTHSNTQYYITAAGRETLGFFRDKLTDAIEHDTIAYFEKNKMALRTVNSIIADYYKTPNQDYAVRCQFRVHDTNLIDLTLTVKNKEQAEAICNNWKKQNEDVYAYLMDILMQMGKSAFKPGNMLYPLPAVMVSCQYPGASDPECSNPALAGRPNILTVAWAGTVCTNPPMLSISVRPERYSYHMIETAGEFVVNLTTEALVRATDYCGVRSGRDVDKFKEMHLTPLASREVSVPGIAESPVNIECRVRQITPLGSHNLILADVVAVTIDDAYMDEAGKFHLNDTGLITYSHGEYFLLGKKLGTFGYSVRKDTPGKKGNGAKKGTPGTKRTPATKEFSAKKGTLSKGGQQEKHEKGSKMKIRFGIVGCGFLGNIVANAWKDGFLEDYELVGVTSRSQESRDKTAAETGCRSCRDLAELLSLEPEYIVEAASVEAVRDMACTVLEHGVSLVLLSIGAFADAAFYGQVRDAARRGCAKVHLANGAIGGFDVLQTITLMAQAGKLDETAGIETHTGARGFRNTPVWAEHLLTDTEKTTVFTGSAKEAIVTFPRRVNVAVATSLATTGPDITQVTMHSVPGWTGDDHCITAEIDGVKATVDICSSTSAIAVWSAVALLRNLASPVCFYMEEMLEVMKKQLKMQKLISGLLAVMLVILLIAGGFFVNRMSQMTAAMSEAADKLQQVDVDGINDAIGTTQEMLESAGELSDAVDSVTLKVKEFNDWMSGLFGNMADFTFSTLKYERPDFTEVEQLFEKLVKQVQEAASYEGLKELLKKAERVQNKLMTACTIASIRHTLDTTDTYYEKEDEYINNTIPTVMPKFLAFDAAVMNSPFRDDIEKEYGKQYFAQKELNRKTFCEANIPLMQQEAKLTNEYQKIMATAAIEFEGQTLNLYGVQKYFEHEDREVRRAAVRAYSDFYHSNEKRLEEIWEELITIRNQMGKNLGYANFIPVGYMQQGRTDYGEKEVAAFREQVRTELVPLCEQLYAAQAKRIGVDTLMFYDEKRVFPDGNAVPAGDDDFMVEEARKMYHKISPETGEFIDFMIEHELMDLKNKPGKAATGYMTFLPDYRAPFVFSNFNQTIFDMQVLTHELGHAFAGYMAMREQPITEYYSESTDIAEIHSMSMEQFSYPYAEAFFGKYADKFRFAHLQEAITFVPFGVAVDEFQHICYANPELTPKERTAEWKKLEEKYMPWRKYDADDFFDRGGFWYHKLHIYLYPFYYINYTLTTMGAMEFKKKNYENHETAWQDYLNLCKCGGSMSYLETLRYANLSNPFEPGSVARAMEVAKQELMNSPFMRMRRLGIDLSYFFTYEDEIPDGVGFSHFGPVHLLWLGVCAGLLLLFLHYYKRWGGRRRLLAERGIGIFLVGLEVYRIAVLALIGKMSLYQLPLHLCSMAGFLCCLHAFFKWDWLGQVLYTLCLPGTVLALLFPDWVRYPAIHFITIQGFTFHAGIVLYVICQLLQHNIIPRLAALWKVIVFLLVVVPPVYLFDKKFHANYMFVNVPSPGSPLEWLASFLGNPGYLAGYAVLMLLCMVLMDAGYRLLLDRKSCGTMSRRRKKAGEKARTMAGSAEAEKTAAGSTPAEQEAGSTSAKETLSASIEPAERSENEAEVWQTGARVRIADMEPDYSDITVKNPRIGKVMRLEEEVQRQSEIEKLRSRRIRQEQEYIDRMSLSVENHLRNTKEEQRYNEQFEERIRTEVYRMHGISEDKLQGMTEYRNAWYQGTAFAMFFLSLVLIAICGILHGFGSEICIFMAFYTAIEGALLSNGRKQSLFFTVLTKGVYLLLFPVMLVTFTCYELGFEEYALLVPVFAVAGVVVLMIGALSYFLYDPYRMDRRNRKKANRYIVEIEKAALKEVRLKERAFAKQEKKQAKFTRKEEARAQKKAERDERRRQRKEARAERHARWRAWWSEKLARLKFVKKESADETHKSPANADTTEEHSAEGDSVERESAERDSAEAESAERESAEEHSTEGEVAKRDMGKPTGFMEYDREDARAIEPKERIKNFNEFHIPLSKERQQIQGARCMNCGVPFCQAGMNIMGMTSGCPLHNLVPEWNDLVYTGNWEQAYNRLKKTNNFPEFTSRVCPALCEAACTCGHWEDPVTCKANEHGIIENAYEQGYAAAKPPKVRTGKKIAVIGSGPAGLAAADQLNKRGHSVTVYERDDRVGGLLMYGIPNMKLEKWVIDRKVAVMKEEGITFVTGTNVGKDVKASKLLKEYDRVILACGAKNPRDIKAPGRDAKGIYFAVDFLKATTKSLLDSELKDGSYISAKGKKVVIIGGGDTGNDCVGTSIRHGCASVTQLEMMPQAPAKRAENNPWPEWPKVLKTDYGQEEAIAVFGHDPRIYQTTVKEFLKDKNGNLCGLVTVKLEPKRDEKTGRVTMTEVAGSEQKMEADLVLIAAGFLGTEKYVADAFGVDLNGRTNVATAEGAYETSVKNVFAAGDVHRGQSLVVWAIREGREVAREVDESLMGYSYLEVQMKEQTTYKKDALNRFSVSDAGKQAAGMYDPGYEHDNCGIGSVVNIKGIKTHETVENALKIVENLKHRAGKDAEGKTGDGVGILLQISHKFFSKAAKQLGIELGEERDYGVGMFFFPQDELKRNRAKKMFEVIVGKEGMEFLGWREVPTDPTKLGQKAVDCMPYIMQGFVKRPADVEKGLAFDRKLYVARRVFEQSNDDTYVVSLSSRTIVYKGMFLVEQLRLFFADLQDKDYESAIATVHSRFSTNTNPSWERAHPNRFIVHNGEINTIKGNADKMLAREETMESEHLKGELQKVLPVINSEGSDSAMLDNTLEFLVMSGMELPLAVMIMIPEPWANNNIMSQKKKDFYQYYATMMEPWDGPASILFSDGDMMGAVLDRNGLRPSRYYITDDDYLILSSEVGVLDIDPTKIVVKERLRPGKMLLVDTVKGRVIDDDELKETYANKQPYGEWLDRNLLKLEDLKIPNERVPEYTKEERQRMQKAFGYTYESLREAILPMAKNGGEGTSAMGIDTPLAALASDHQPLFNYFKQLFAQVTNPPIDSIREKVVTSTTVYIGEDGNLLEERAENCKVLKVNNPILTNTDLMKIKAMKVDGFKVEVLPIIYYKNTSLEKAIERLFVEADRAYREGANILILSDRGIDENHVPIPSLLAVSALQQHLVKTKKRTAVAMILESGEPREVHHFATLLGYGACAINPYLAQDTVKQLVDEHMLDKDYYAAVQDYNAAILNGIVKIASKMGISTIQSYEGSKIFEAIGINKDVIDKYFTNTVSPIGGITLEDIADDVNELHSAAYDPLGLETDLTLDSRGRHKMRSGADPHLYNPATIHLLQEATKRGDYELFKQYTELVNKEEREITLRGLMDFNYPKKGVPLEEVESVDSIVTRFKTGAMSYGSISKEAHETLAIAMNRLHGKSNSGEGGEDADRLASKSSPVNRCSAIKQVASGRFGVTSEYLVSAQEIQIKMAQGAKPGEGGHLPGKKVYPWIAKTRLSTPGVSLISPPPHHDIYSIEDLEQLIFDLKNANRDARITVKLVSEAGVGTVAAGVAKAGAQVVLISGYDGGTGAAPSSSIHNAGLPWELGLAETHQTLIMNGLRNKVRIETDGKLMSGRDVATAALLGAEEFGFATAPLVTLGCVMMRVCNLDTCPAGIATQNPELRKRFAGKPEYVENFMRFIAQDLREYMAKLGCRTIDEMVGRSDLLKVREDLSGRDREIDLSNLLNNPFAGPKEKVTFDPKHVYDFELEKSKDVTVLLKQLKGALEQKQRRSIDVEVTNTDRSFGTIFGSEITKKYGGEGLPEDTFIVKCNGAGGQSFGAFIPKGLTLELVGDSNDYFGKGLSGGKLVVYAPAGVKYEKDENIIIGNVALYGATSGKAFISGVAGERFCVRNSGASAVVEGVGDHGCEYMTGGRVVVLGKTGKNFAAGMSGGIAYVLDEDNDLYTRMNKEMVFSQEISNKYDVMELKDMIKEHVALTNSEKGKKILDNFSEYLPKFKKVIPYDYNRMLMAIVQMEEKGLSSEQAQIEAFYANTRGMLQPIFLLMVLIFLNAVFASAEIAVISMSDLKLRQLCEAGDRRAGKLEALIKQPAKFLATIQVAITLAGFLQSAFAAENFAQPLVTLLRGTGIPVAEEALKSACIVVITLILAYFNLVFGELVPKRVAMKKAEELALKMAGMLSLVAKIFAPLVWLLTASTNFWLRRFGIDPEEEEETVSEEEIRLLLAEGREQGTIPTEETEMIQNVFGFDDIAVGTICTHRREMVSLSTEEDEAVWDRILAESVHTYYPIFAGRSEDVVGILDGKAYFRMKDHTRDKVMQCAVQKPMLAADSMKANRIFEQMKQQQNYFAVVTDAYGGVTGIVTLCDIMEYLVGDLENTATAMKTTGAYKIWRIIYPIGIYYVVSSLAYFFLTLLLGAGEESYMLRQMLCAAATIPFVWMHYGQDRAARETVYGRRGIRPDARFFCTVAGSLLAGASLGMAVNNVIAMTPLIEASAGFQSANQAFFAGGVVFELLGSCLVIPLAEELLYRGVVERRLSLLCGSAPAIVLSAVIFGVMHWNVVQFLYAGILGLLLAWLLERTGFLYAPVLAHIGANVMAVVRSETGWLDIAYQPTAAGVAVTVLLFAVAAFAVLLVKKGGVRQEEEKTSAAMIKAVLFDLDGTIINSEEGITKCVQYALRAYGIDEPDCTKLRCFIGPPLDPVFREKYGMTEAEAWQSVEKYRERFDVKGIFECSLYDGVREAIARFKEHGYLLALASSKPETACRRILEHFDLLGYFDEVVGSTLDGSISTKAEVLEELGRRMAGSHIGKNELCLIGDTKYDAAGAKAFGIRCIGVSYGFGTREELFAAGAEAVFDRIEEVETYIENDAAGEGEAEMKQEEQIIRTEYSELMQKSYIDYAMSVIISRALPDIRDGLKPVQRRTLYDMYELGIRYDKPYRKSARIVGDTMGKYHPHGDSSIYGALVVLAQDFKMGQTLVDGHGNFGSIEGDGAAAMRYTEARLQKLTQEAFLADLDKDVVDFVPNFDETEKEPEVLPVKVPNLLINGAEGIAVGMTTSIPTHNFGEVIDGVIAYMKNPDINTEQMMQYIPGPDFPTGGVIANKDELTAIYSTGIGKIKIRGKVEVEQVKGGKERLVITEIPYTMIGANIGKFLNDVYSLVETKKTNDIVDITNQSSKEGIRIVIELRKGADAANLENLLYKKTKLEDTFGVNMLAVVDGRPETMGIVPIIRHHVNFQYELAKRKYTTLLARELEKKEVQEGLIHACDVIDLIIEILRGSANVKMARACLTEGITDGIAFKSAQSQKDAQSLRFTERQADAILEMRLYKLIGLEIEALMKEHEKTLANIAEYNEILSNRAAMAKVIIRELEAYKKEYGRPRRTVIDNLKEAIVEEKKIEEMDVVFLMDRFGYAKTIDVAAYERNREAADAENRYVLTCKNTDKICIFTNKGQMHLLKVLDLPFGKFRDKGTPIDNLSNYNSSEENFVYITNLGAICNHRLIFGTKTAMLKIVDGSEFDVAKRTTAATKLTDGDEVLFVHPVAGNETIVMQSERDFFLRIAVDTIPEKKKGAVGVRGMRLADGDALTAIHLLDDGESAQTEVKGKPVMLNRLHVAGRDTKGTKKMAKKETYDESSISVLEGLEAVRKRPGMYIGSVSRKGLNHLIYEIVDNAVDEHLAGACDTIYVTLEADGSCTVEDNGRGVPVGMHAKGVSAARIVYTTLHAGGKFDDSAYKTSGGLHGVGSSVVNALSTYMDVEISRDGYIHHDRYERGVPVVELENGLLPKIGKTKKTGTKVNFLPDPEIFEKTRFKEDEVKSRMHETAYLNPELTIIYEDRRGEETEHIVYHEPEGIKGFVKDLNKSTEVLHDVVYFKGETEGITVEAAFQYTNEFHENILGFCNNIFNAEGGTHITGFKTVFTTVINAYARELGILKDKDANFTGADVRNGMTAVVSIKHPDPRFEGQTKTKLDNQDASRATAKVTGDEIQLYFDKNLEVLKTVISCAEKAAKIRKTEEKAKTNLLTKQKFSFDSNGKLANCESRDASICEIFIVEGDSAGGSAKTARDRSFQAILPIRGKILNVEKASIDKILANAEIKTMINAFGCGFSEGYGNDFDITKLRYDKIIIMADADVDGAHISTLLLTLFYRFMPELIYEGHVYVAMPPLYKAIPSRGEEEYLYDDEALERYRRSHKGSFTLQRYKGLGEMDAEQLWETTLDPKRRLLKRIEIEDGRMASDITELLMGNDVPPRKTFIYEHATDATVDAMAGYVYTNENCIGCNRCISVCPVLTANQAVVVDGKPRIEVNHAQCINCGACFDACEHQAREYADDTEQFFADLQRGESISLLLAPAFLANYPREYEQILGGLRQMGAKRIISVSFGADITTWAYINYITKNQFTGGISQPCPAVVNYIEMYAPELLPKLMPVHSPMMCAAIYAKKYLHITDKLAFISPCIAKKNEISDPDTDGYVSYNVTFDHLMDYCRKHRISGPGVSDEIEYGLGSIYPMPGGLKENVYWFCGEDVFIRQIEGERHVYEFLDAYRKRVAEHKELPFMVDALNCAMGCIYGTGVEPEKTAGDDVLYELHKIREKSKKVKGPWARSATPKQRLAQLNRQFAQLEPADFTRRYTDRSKGNEIRVPEGQELEAVYSRLNKQTAMDRAIDCSACGYKTCRDMATAIYNGCNSENSCIHFIKNEAEERGRAAQAAAEESQQANVEIQRRSDLIAGIIEGLNSDFQELDSAIGQMAAGNSSNASESTAITDAMTGVTGFCQEMRQSFEAITELLDKLENNNNDITKIANQTNLLSLNASIEAARAGAAGRGFAVVAEEIKNLSENSRATANDSNDNKNEISQAIGKLLEESDHLTEIIREVDERMTNLAASTEEIAASTDSVKEISSDLKDKAAELMNMMISNHKIQAALDEIKEISKIDLALYTDKGKQVAATFETEGDMEYAVNSFAGSMAESQMLSGCHFFKVYVDGELEYVLLTKSSAEDAYMVGRLAVCQIRTLVSAYMEQFDRNNFMQNILLGNMLVVDMYNKAQKLHIEQAERVVFVIELEGKKDATAIELVKNLFAAKTRDFVTEVDEQSIVLIKDTREMGEDEDLVSLASMIVDNMHAEAMVRVRVGYGNRVNNLQDIAKSYQEAKMALEVGKIFYAEKETIAYRYLGIGRLIYQLPMSLCEMFIHEVFGDEIPDVFNEETTTTIQKFFENNLNISETARQLYVHRNTLVYRLERLEKVIGLDIRKFDDAMTFKIAMMVISHMQYVKNSENALNMASLSLKNVCKVYPNGFEAVKDFNLEVEDQEFIIFVGPSGCGKSTTLRMIAGLEEISSGEFYIDGKLMNDVEPKDRDIAMVFQNYALYPHMTVFDNMAFGLKLRKVPKDEIKRKVEEAAKILDLEKLLDRKPKALSGGQRQRVAMGRAIVRNPKVFLMDEPLSNLDAKLRVQMRSEIASLHNRLKATIIYVTHDQTEAMTLGTRIVVLKDGVIMQVDSPQKLYNEPNNLFVAGFIGSPQMNFVDAVCKVEGEKVSLSFENTTVVLPPAKAKKLADGGYNGKTVVMGIRPEDIGDSEIEIEAHKDAAFETDVTGYELLGSEVLLYFKVAGASMTAKVDSRTTARMGDHIKMAIDPEKIHVFDKETELTITNMPQIRIKYFTDAIERLTYIDGKSDWIDLRASEEVTLKAGEFCLIPLGVAMELPEGYEAHVVPRSSTFKNYGIIQTNSCGIIDGTYCGDDDMWRMPVYAVRDTVIHVNDRICQFRIFENQPKITFDEVESLGNKNRGGFGSTGKQMAKVAVIGAGSWGTALAKVLHTNGNQVTVWSIVEAEIAMLRERHEHVDKLPGVKLPEDMEFTTDLKAAVEDKEYLILAVPSVFTRSTAKSMAPFVKAGQIIVCVAKGIEENTLMTLSDIVEEEVPAAEVAVMCGPSHAEEVGVGLPTTVVAGAKKRKVAEGVQDIFMNEVFRVYTSPDVLGMELGGSLKNVIALAAGMADGLGYGDNTKAALITRGITEMSRLAIKMGAKAETLSGLTGIGDLIVTCESRHSRNRKAGMLIGQGYTMKQAMDEVKMVVEGVYSAKAAIALAKKYGVDMPIIEEVNCVLFEDKPAKEAVRELMMRDRRAEHSALEWEAMIGARVIALGIGYLFGLFQTGYLYGKSQGIDIRSEGSGNAGTTNSLRVLGIKAGLITFAGDLCKAILAVLLVKVLFRNAYPDAVKILELYAGFGAVLGHNFPFYLKFKGGKGIACTSGMILAVCPLAAPVCLILFIGSIAITRYVSLGSILVVTSYLVQVLIFGHMGYLHIDAAYLPEFYVVSACFTAMALWRHRSNIGRLLHGTENKFTFKKNKQEGKMSKPVVAVVGRPNVGKSTLFNALAGERISIVKDTPGVTRDRIYADVNWLDYHFTMIDTGGIEPDSRDVILSQMREQAEIAIATADVIIFLTDVRQGLQDSDSKVADMLRRSGKPVVLVVNKVDSFEKFMPDVYEFYNLGIGDPFPISAASMLGLGDMLDEVVKHFPDYAKDEEEDERPKVAIIGKPNVGKSSLINKLAQEDRVIVSDIAGTTRDAIDTDITYDGKEYVFIDTAGLRRKNKIKEEIERYSIIRAVTAVERADVCIIVIDATEGVTEQDAKIAGIAHERGKGIIIAVNKWDAIEKDDKTIYRHTEKIRQILSFMPYAEIIFISAKSGQRLNKIFELIDVVIANNSMRVATGVLNEIVTEAVAMQQPPSDKGKRLRIYYTTQVAVKPPTFVIFVNDKELMHFSYTRYLENRIRETFGFRGTALKFIIRERKEEQMFASDSVSLPRLDNPTGACPAHRRQWADFLVSLMAPLHRQYKTARTELAGICYMKSKTSCFNRTIFKKNFTHFWPLWLLYQIYLLVVIPVWVWQKAASPYYYYGTGNEDTTYRMYQLVEMAVHRMIPPLPVFFFAVAAALAVFSYLYSAKSANMMHALPVNRLELYVTNYLSGLIFLIVPEIITFFITVLVCLANQFTCIQYLFAALLAQAGVTFFAYSLAVFVAMFTGQAFAMPCYYVIVNYLYVGCMFIVAKVIETISYGIENAWNPGKSCILSPLYYLNNNLRSSLIYTENGNGITGIKITGMPLTGIYAAAAVVLVVAAYQLYKRRQIETAGDWVSIGIIKPVFRWGAALCGGLVVGVTVISMLTDLPQLRKYPCLLLCSVAMGFLFFFGAEMLLEKNFKVFRRKRVLEWAATAVITVVFVSLFEIDAFGLERYVPEVADVETAFVYLDYPVQVKGEELATLTELQRQIIANKDAYQEVERTGSGFYYTTFLYYMQDGSKVERRYALPLPEADGGADSTPAEQILAWESEPENLEREIFGIGNSECRFTSGYMDLYTSTGLNNTHMFSEKEIEQILKAIRADIEDGNLAKYYQYCEPPEDTYYSNIELEYYSTGRYVDNWMYYYDYYNSLEQLEGKAVDGQETTVGGNLYLTFGPDCVHIVETLEKLGITNDEWKLMTNQEMMQMIQVNGLKKAFDGFVALNGVDMHVEKGAIYGLVGPNGAGKSTLIRHLTGVYRPDQGEVQIDGENVYENKAVKSKIAYIPDELFYFMQADTMEMKRFYEGIYPSFDGKLFYRMQEFFPNIDVKRNIRRLSKGMQKQVAFWLAICCKPDILILDEPVDGLDPVMRRQIWSIILSEVAEKEMTVLVSSHNLRELEDVCDHVGIMHHGKIMIERSLSDLQGSVSKIQVACQSGMPKLPEHFQVLHMANTGRVYTMIVKGDPKEAEAALSYCNPTIVDVLPLTLEEIFIYEMGGADYEVKDILFMYEGTFHAIVAVLRQIVQLVQMGGYDLIQLNYRDSKPIYEQIKDGFRKLIITNSLSANEKLPSVRELASGLAINPNTIQKAYRDLESEGYTYTVAGKGTFVAEHREILNTRQHELLEEFDEVVEELCFLSVSRSDLITRIEHAAERGEKVMKTKKYVEYMVEETKKILAIDSPSGYTADVADYVMKAYQKLGYEPKLTTKGGVLVALGGKDKKNAVMLEAHIDTLGAMVAEIKSNGRLRVTPVGGMNANNAEAENCRIHTRFGEKVYEGTLQLANASIHVNGDYNDKKRTFDETEIVLDEKVHSREDVEALGIMTGDIVCFDPRTTVTESGYIKSRFLDDKLSVGILLGYARYLKEENVTPERMIYQHITVFEEVGHGGAASIPEGVTEVISVDMGCVGDGLACEETQVSICAKDSHGPYHYDVVTGLIAAAKREELDFAVDVYPHYGSDADVALTAGYDVRHGLIGAGVYASHGYERSHVDGVKNTFKLLCAYLGMTAFVRKPAEQPVLREDWHENEDGSRLLLLKYPLLECTGIVEHCFTTRLGGVSTDIFSTMNLSFTRGDEEAAVRENYHRLARALGAEVGQFVCSDQTHTVNVRRVTAADAGKGLTRERDYRDVDGLITDEPGLVLSTFYADCVPLYVVDPVHRAIGMSHSGWRGTAARMGAVTLSAMQEAYGTRPEDVVCAVGPSICKDCYEVSADVADIFAEEFPGHEQEILAESEKNSVGMAHADKKYQLDLWKANEIIFLEAGVRKEHLAVTDICTCCNPKLLFSHRASHGKRGNLGGFLYLKMNRRQTGTAYERRAGEYLKEQGYELIGYNFRCRQGEIDIIARDGRYLVFVEVKYRRDGQTGDPLEAVDRAKQRRISRTAQYYCLTHGYGETTPCRFDVAAVLGTDGEVRLVKHAFEFQGMAENKHIAGKEKTAVAVAYNPGEVAPKILAVGKGEVAERIIETAKENDVPFYQDNKLAETLSRLQIGDTIPPELYEVVAEILVFVDDMDRMKGKLKESGLLMQISDLVGQYSRNVANGTEELHGAQSVQKLVSTIGDLSAGSIFEGTINSVRGGKVTLALGNGQTITARLDGKMDLQQGSSMFFQVRANDGQTIAIRPYTELGNVSNPILLNALSAAQVPATDRTLVMVDTMMQEQMSIGRQSILDMAKLVGANPDANVQTIVQMTKLGLPVTEEMAAQFENYLSDRQALVGEMDLAAGHMMELLSDEALSPETAFSLYGKMLDIFMPGEEAADAGVTAAAGQESSAAEAGAGAMAEAVGQENAATVSEAEAGAPTAAEQGTAAASAVAEEAGAASTAETAGQGAAAEAETGVGVTAELTYGRTAETPGTVGELLSKEQIEHLGKMLRNIPALIGNEEIFAGGEQEEVFVDTLSEEGPEVAKLMAQEEAAQEQPVLNEKLTAEQFLQKLGRALAQNGGFGFAGMQKLFAGKEFQTIFRSVIEKQWLLQPEELKQEHKVSGLYERLEQQLSQMEEAVRATGSTQNTFLQTASQVHGNLEFMNQMNQIYHYVQLPLKMSGQNANGELYVYANRKNLRDPDAELTAFLHLDMEQLGSTDVSVRMQNRSVRTNFYLEDDASYDLVEKHLEVLNKRLKSKGYQSSITVTHEKKDISFKENIVKKGKATVGSLHRYSFDVRAMETKKIGEIREEFKAAEETMLPSFIEKYRSDERAGVQKLIEQANGRLAKLEAERARIDRLWKYEREYGMYTRICGIDEVGRGPLAGPVVAGAVILPKDCDILYINDSKKLSAAKREELYDVIMEKAVAVGIGMVGPERIDEINILQATYEAMREAISKLGDAPDILLNDAVTIPGVAIRQVPIIKGDAKSISIGAASIVAKVTRDRLMVEYDKIMPGYGFAANKGYGSAEHIAALKKYGPTPIHRRSFIGNFVEVMQFQWYPGHMTKAKRQMQEDIKLIDLVIELVDARIPLSSRNPDIDELGKNKARLILMNKSDLADEEAGKLWSAYFQKKGYYVVSLDSRNRNGMKQVTAVVMEACKEKIERDRKRGIMNRPVRAMVVGIPNVGKSTFINSYAGKACAKTGNKPGVTKGKQWIRLNKNVELLDTPGILWPKFEDQTVGLKLALIGAIKDEILNIDELSLELIKVLTAYYPGAFQARYGTEEQAIDETAAPAEILRGIAENRRCVAKGDEIDYSKAATLLIDEFRSGKLGRITLERPDMRRRRSGLNFGRQKKKVNMSVVKEVCVWIIEIAITLLVAFTLVYFVGLRTSVVGQSMAETLNGGDEILVNRFIYKVTDPRPNDVIVFLPNGNEKSHYYIKRVIAVPGDTLQIKNGEVYVNGELFAEDVDVAQMEDAGLAAEEVTLGEDEYFVLGDNRNNSEDSRYANIGNIKKEYIIGKVWFRVAPFKDFGFLMNASEIIKSIEAEQLKAEVPQFNVGDTVKVYGKIKEGNRERIQVFEGTVLKRQGGSNRETFTVRKISNGVGVEKTWPLHSPNVEKVEVVRQGKVRRAKLFYLRDRVGKKAKVKELVKMNYHILTLFPEMVTQGLSESILGRAAKKGLLSVNAVNIRDYTADRHKKVDDYPYGGGAGMLMQAQPVYDAWKAACEEIRSRQPEELRDRPVRTVYVTPQGAVFNQQMAKEFAKEEDLIFLCGHYEGIDERVLEETVTDYVSIGDYVLTGGELPAMVMIDAISRMVPGVLANGESGETESFEGDLLEYPQYSRPEEWHGKQVPKVLLSGNQRKIAEWRRQEAERRTQERRPDLYAGYGRLMSCKKVLAGDKLLHVDMTELIARGQARLVFAEGKNICLQDKVSGAYFHTAEDIKAGCRMLEILHGDAGEESGLLVLHQEFMTEPTEKYLGFRTAMTCNQIVYTKHEKLPVTGLYRMDGKPAENGVVIRPLTMEHLDAVVRDYNTISDEAYVTDRIKKGALFGAFVDGQLAGFIGMHAEGGIGMLFVSPEYRRRRIGMALETYMINLGLERGERPYGQVEIGNDASKGLQEALGLCFSKGRIYWMEREEREMEDLLQVGVITTTHGVRGEVKVFPTTDDPARFKKLKNVILDTGKEKLELEIAGVKFFKNMVILKFKGIDDINDVEKYRKKSLYVTRENAVKLKKDEYFIADLIGMKVSTDEGEELGTLSDVMQTGANDVYVISMTDGEEVLIPAIRDCIRDVDVEQGQMCVHLLPGLLDINRKMKELVEVIAKSLVDYPDQVVVTETENEKAIVLELRVAQSDMGKVIGKQGRIAKAIRSVVKAAASKEEKKVIVEIMQMAVKIRLRRMGQKKAPFYRIVVADSRSPRDGKCIEEIGTYDPTKDPSEYHVNEELAKKWLANGAQPTDTVARIFKSAGIEKMAFDSLSEKLQNVFKNLRSKGRLTEADVKTALKEVKMALLEADVNFKVVKQFVKDVEERAVGQDVMNGLNPGQMVIKIVNEEMVRLMGSETAEITLQPGKAVTVIMMTGLQGAGKTTTAAKLAGKFKQKGRKVLLVAGDVYRPAAIEQLQINGQKQGVEVFSMGDKNSPVNIAKAAMEHAAKNDFNIVIIDTAGRLHIDEDMMAELIQIKENVTVHQTVLVVDAMTGQDAVNVAKTFDERIGIDGVILTKLDGDTRGGAALSIRAVTGKPIFYAGMGEKLSDLEQFYPDRMASRILGMGDVLTLIEKAQEDFDEERAKKIEQKMRKNEFDFEMYLESMSQMKKMGGLSSILGMMPGLGMGAGKMPDIDEAAAEKSLSRTEAIIYSMTPEERQNPSLLNPSRKRRIAVGAGVDIAEVNRLVKQFEQMKKMMKQMPGMMKKGRRGGGMFGKLPFMEEKIEQAYLYDFYGELLNEHQRRIYEDFVFNDLSLGEIADEEGISRQGVHDMVKRCTKTLEGYEEKLHLIAKFMSAKRSVEQIHALTKQFHESHDEAVIVEIEQISNQILEELMRRWIKQIMVWLVAAACGFAAALVICRWSGTAFGLFMWPVIAAGAGFVVAGVGFFSTEGKSEILYGICAAACLFCMIVQTAMAVMLEKWFKLKENNTTAKTEVMAGITTFMTMAYILAVNPTMLAAAGMDKTAVLIATALASFIGTMAMALLANYPFALAPGMGLNAYFAYTVCGAMGYSWQVALMAVFVEGLVFIVLSLTNVREAIFNAIPLNLKKGVSVGIGLFIAFIGLQNGGIVVANSSTLVSYVDFTSNFKTAGICALLALIGLFVIAIMYIKNVKGAILFGIVITWVLGMLCQAAGIYVPDAEAGFYSLYPALGFTDLTAIGQTFGQCFKLDFSNVRVFDFIAVVCAFLFVDMFDTLGTLIGVANKADMLDKDGRLPRIKEALLADAVATTAGAVLGTSTTTTFVESSSGVAAGARTGLSSVVTGFLFLISVVLSPIFCSIPSFATAPALIFVGFLMVSTVTSIEFTDMTEAIPAYLCLLAMPLMYSISEGIAIGVISYVIINVVCGKAKKITPLMYVLAVLFVCKYIFLMLTLDKFEEASEKVKEVTLETKLVYSDYWSQQTGNKVYLKPENMQFTGAYKVRGAYYKISTLSDEERAKGLITASAGNHAQGVAYAAKCYGCKAVIVMPTTTPLIKVNRTKSYGAEVVLYGDVYDEACQKAYELADKEGYTFIHPFDDLAVATGQGTIAMEIFKELPLVEYILVPIGGGGLATGVSTLAKLLNPKIKVIGVEPAGANCMQASFAAGKVTTLPQVNTIADGTAVKTPGSKIFPYIQKNLDDIITVEDDELVVAFLDMVENHKMIVENSGLLTVAALKHLDVSDKRVVSILSGGNMDVITMSSVVQQGLIFRDRIFTVSVLLPDKPGELSKVSAAIAAEQGNVIKLEHNQFVTTNRSAAVELRITLESFGTEHKKQIMKALEKKGYKPKLVRTSLMGEEKKGFWGRLVEGLSKTRDNIVSGIDSIFSGFSSIDDDFYEEIEEILIMGDIGVNATESIIESLKEKVKENHIKDPAECKELLINSIKEQMDVGETAYRFETEKSVVLVIGVNGVGKTTSVGKLAGKLKDQGKKVVLAAADTFRAAAGDQLQEWANRAGVDMIGGQEGADPAAIVYDAVAAAKARNADVLLCDTAGRLHNKKNLMEELKKINRILEKEYPDAYRETLVVLDATTGQNALNQAREFSECADITGIILTKMDGTAKGGIAVAIHSELGIPVKYIGVGETIEDLQKFDSNQFVNALFEVGEEKSGCMYLKSIEVQGFKSFANKIVFDFHNGITGIVGPNGSGKSNVADAVRWVLGEQSAKQLRGASMQDVIFAGTENRKPLSYAYVAITMDNSDHQLAIDFEEVTVARRVYRSGESEYLINGSPCRLKDVTELFYDTGIGKEGYSIIGQGQIERILSGKPEERRELFDEAAGIVKYKKRKATAQKKLENERENLVRVNDILAELERQVGPLERQAEKARIYLKKKEELKEYDVNMFLLEVERIEAQLKEVEGKYHIADEESKEASQSYENIKSEYEKLEQDMASMDDKIASIREEMSQSTVTKGKLEGQINVLNEQIHTAEMTDEHLKSRLDSIDREKQERIESRGTYEAEKQELDTELVAAATEKETAAEQLRNIQEEIARCTEGIEKGKNEIIELLNRKASVKARQQRYDTMMEQVNIRKAQLTQRLLARKTEEADLTSVLESYQKELDAVNASIAELKKNAAGMDEQNREWKRKSLEANQKLESAVAQYHKQQSRLESLKNIAERYDGYGNSIRRVMEQKSRNAGILGVVSDLIQVDKKYETAIETALGGNIQNIVTEDEETAKQMISYLKQNRYGRATFLPLTSVDGKGNFKNTDALKEPGVIGLANTLVKTEEKYAGVTAYLLGRVIVTENIDYAIKLAKKNRYSLHIVTLEGEYLSPGGSMTGGAFKNSSNLLARNREIEELEKNVKDLDKQIAELKNRLEDIRTAQSLLAEDVESNKASLQEAYIAQNTAKMNVERAMEQKNESENVFAGLQMENREIESQLREIAENKDKIAEELQSAKEREAQIEEESAGFQKILDENAGREEEAQKAVSDVQLKEAGVRQKLEFVLQNLERVNGEIRRYEEEREGFVTEAKEAKADAEKKRHDIEEIKKTILASKDNSEQLEQALKEHTARREEMSSEYKGFFQKREDISKKISDLDKEIFRLNSQREKLEEAHEYQNNYMWEEYELTLHAAMELRNEEYTDLAAMKKMIASIKDEIRKLGDVNVNAIEDYKEISERYGFLKTQHDDLVEAEKTLVGIIEELDTGMRKQFLEKFAEIQTEFDKVFKELFGGGKGTLELVEDEDILECGIRIIAQPPGKKLQNMMQMSGGEKSLTAISLLFAIQNLKPSPFCLLDEIEAALDDSNVGRFAKYLHKLTKSTQFIVITHRRGTMAAADRLYGITMQEKGVSTLVSVNLIEGDLDKMSKLTELEQVIGYEFNEQRLLQQALTHSSFANEKHMKKLSDNERLEFLGDAVLEVVSSEFLYKEHTDLPEGDLTKLRASIVCEPTLALCTREIDLGKYLYLGKGENLTGGRGRKSILSDALEAVIGAIYLDGGFEPAKAFIHRFILTDIEHKKLFYDSKTILQEVVQGHYEEPLHYELIGEEGPDHDKRFLVEAVIGNTTIGEGSGHTKKAAEQEAAYQALLWMKERGLYVSMEFEKLKKIIAEVLNVDEEEITMETTFVDDLGADSLDIFQIIMGIEEEFDIEIANEDAEHIVTVSDAVEEIKNALNSMQQSSGAVRTRIVLDAMGGDYAPAEPVKGAVDAVNARSDIQVLLVGQEDVVREELAKYTYPEDQIQVVHAEEVIETAEPPVNAIRRKKQSSIVIGMNMVKQKEADAFVSAGSSGAILVGGQVIVGRIKGIERPPLAPLIPTEKGVSLLIDCGANVDARASHLVQFAKMGSIYMENVLGVKKPRVAIVNIGAEEEKGNALVKETFPLLKACEDVNFVGSIEAREIPKGEADVIVCEAFVGNVILKLYEGLSSTLIGAIKKGMMSTVKSKIGAALALPALKSTLKTFDATQYGGAPLLGLNGLVVKTHGSAKAKEITNSIFQCVTFKEEDINGKIRKNIVSSAEQEGMMGDFFNLDNKFFQGLSKVVDCVILSVLWVFCCIPMATTFFLAWQSASVFGWILCWLTSFLAGPATTALYYAVNKVIRHGRSYLWKEYWHAFKSNFKQAALAALILTGVVLFLGLDCYIMYQFAAQGQKSGVLYVVFLVLIVLVVMLAVYLFAYMARFENSLGQSFKNAALIAVANLPWSLLLLVLLAASAFGLWMLPWLMILLPAVYILVANFILERIFRKYMSAEDLEAEQERNQEFFNMRRVHRYRMKAVLMLWGIGLLLGLGGCAEQTQDAAGEESGTTEQIPQSTEQMPQGSGQTGVETEQMAPGSGQTGTGTEQAVQSSEGTGVETDGAEDTMEAVLEQALPSVVQIYHGTPEGGHTAGSGFIMEMTDDTVYLCTNRHVIAKYDDWDVYFYDGTCIPGSKAGTDDVYDVGVVAVDRTAIPKKVQEKLKTVSYDLASWEELGNAELPVGIVRIGQEGNVLHTLTGSLLRKETEFLWGQGEKETEVRMAITDGDSGSAVFDENGKLVSMIFGCSQDAGGERDWGVPLRAIVSCYEKITGETMKKELNETETKRSAKRSGMARRITALVLAGVLTFGGTATVSAATLRDVFDAQYYSETYSDLKDAFGTNQTALYKHYKTFGKSEGRTSTALIDVQKYRAAYPDLDAAFGDNWDAYVNHYIKYGFNEGRNSFGTFDARAYADRYPDLKAAFGYDVLALYKHYLKFGRAEGRDASAAVAATSSYTESSYSGSSNTGSADNGNNTSTNTAPIRTNGRLTNPETGAPVAGATVTFRLTSFNATAEEAEAATESVETTAETTESTEATETTESTEATETTESTEATETTESTEATETTESTEATESTEETEEPENGLVVGDGYYEITTDADGYYEIPEFVPGVYSVQAAAVGYLTLTVNSISINADNGSFTLPTFQLLSSDMSGVNTVAGVAKNATTGLGIEGVTVNVRANWNNQSGDVIATTTTDADGSYSFSLERGYYTLEFARDGFVSTFVNVASSNAIGACEGVLSPTSTSEVTSTEFRIVLTWGETPRDLDSHLVGLDDANSVFHIAYYNKVERDTDGNVIASLDVDDVSSYGPETVTIVNARTDATYYYSVKDFTDRYDATSTKMSESGANVKVYQGSVLVKEYNVPLNQAGYIWNVFKIENGNVVDINNYNADETTMYGEYASEYNYMSICPKNKSSKGRRDKRRANWKMTAPALVKCSKCGELMMPHRVCKNCGSYNKKEIIPQDMQIDISEIVSCENREVTEKVHIEQDTFVSRLGEFPITKSAPFDLRIANREGSELLLSGETDLTVSIPCSRCLTEVPTDIHIVIDKKLRMDGTEVVDDEMEETDYLIGLNLDIDKLIYGEILVNWPMKVLCREDCKGICKVCGMNLNKGNCDCQRTELDPRMAAIQDVFNKFKEVMNVLVINCGSSSLKYQLIDSESEAVLAKGLCERIGIDGRLVYQKTGLDKEITEAAMPTHKQAIQMVLDALVNPKTGAIASLSEIDAVGHRVVHGGEKFAASTLLTPEVLKTIEECNDLAPLHNPANLIGIDACKELMPNVPMVGVFDTAFHQTMPKKAYLYGLPHEYYEKYKVRRYGFHGTSHSFVSKRTAEFLGMDLKNSKIIVAHLGNGASISAVLNGECVDTSMGLTPLEGLVMGTRSGDIDPAIMEFIAKKENLDIEGIMNVLNKKSGVQGMSGLSSDFRDLQAGHEAGNELATNAIEVFSYRVAKYIGSYVAAMNGVDAIAFTAGIGENVNLVREKVMSYLGYLGVTVNQAVNDATHGDEAIISTADSKVKVCVIPTNEELAIARETVALVKMKRNRNIGAILLIAAGLLLIAAALYELIPALLAYKRADDTYEALREAYVTGQPGTSSDDPAEEGEELPAWYEALQVDFETLKEANPDVTGWIYFDNIEQINYPTLYSGDDETYLHTDLYGNASKSGCIFMEGNNVPDFNDCHTILYGHNMKNGSMFGSLKQYKNDGFYEKNAYFTVFTEDAAYRYQIFAYSDVPEDSDVYTTGYLPDETFDGFLTELLKSSYKDTGVTVGKDDKVLTLSTCSGDGLRFVVHAVRVDEHESGVMNVIGIIAEYNPFHNGHAYQIAHVRKNLHADYIVVATSGDYVQRGEPALLDKYTRARMALSSGADVVLELPVLWSTASAELFADAGISLFEKTGCVNGICFGAESGDLALLRRIADVLADEPADLKASLKHNLKSGSTFPKAREAALLSYFSGSAGQDGALPVSAEALSSLLASPNNILALEYLKALRRRASSITPYLLKREGAAYHETSIRSGASEVPASASAIRHTLFAGGAGASEDSADGILHHAMPQEALSILQDYRADFPLLCADDFSSILGYLLLSSSASQLARTADSSPEFANRMRNQLPYYTSFSSFASRLKSKEMTLTRINRILLHSILGITSSDYACGNALDKIPYLRILGFRKSAAPLLAALKASAAVPLITRPSQAPKLLSPDAMQVFEHDVFAGNLYLQMRNQKGGTPLRAARMQEHDVPPASEYQRQIVILPMNFKKSKIRSLVLLALAAVAFCGLIWFANKDRPVYRSSNMAGTDYEVGRVLRVVEDHKTVDEEMDGIWRGSMTLEVEILTGRYKGDTAIVENYFSSLYNVRVAEGDKVSIRIDTTGEDEYQVSVYNYYRVPQMIGCIVAFVLLLVLIGGKKGAKSVAGLAFTVVCILWILLPLALKGYSPLAVTILLILVCNFVSFFLIDGISTKTVVAAIGSMLGVLAGAVFALIAQNAMSITTYQMDEAETLLLITSTTELKIRDLFLCGILISCMGAVMDVAMSICSAVAEIHQVDRSLGMAKLFASGMNIGRDAMGTMANTLILAVAGTSLNMMLMIYSYDVSFQQLMNTDFVAIEIIQCIAGSVGIVCTVPLVALLSAAVFGKKTKKMKKKNHWKNICALFFAFCMVFSTVAGDASFVTAYAAEVQTTAGSEAAENPSPAEESGADSTEGAQNTINQESAAQTGNAGQTDAAQTDGAVQTDAAQTDGAAQADAVQNTESGADQNTALIQTAGAESLAAFSYTAAPEAGLPTAATTGSGTLDVSGVSYSGFSKGIAAKGWSEGAGFTVAVNAAGYTDLKFSADMRSSGTGPANFALEYSIDGASWTKISGTDVTLSTDLAPVYQQTALPAALSGKAFTLRVTMQGNTSVNQSTVGTNGVTSINNIVVTGTQGEVATDGTVCSKVKASVEPGDVEAGTKVELSCATEGATITYHTDLDNADKTYTEALVIEEDVTIYATAELEGYETSETAEFAYAVKQGAKSKEAALATTLSDGNMVALYYENNGTGSVLSQTASGKKLKGVSATAADGALAIPEDAAELTVSVDENGYYTFTCGGKYLTSGATGSSVTFADAAGDYSLWKLQKANENGGYYVINANAKYNNTTEQYLEYYSGFTTYSYKSSSDAAYVFYFYLIDEGTPSVHIRADESVTENVAQWSGTADYKTAGVTADTGIAGDSLNANDLLDADAIYSAVVNGAAVAPYTEATSTSTGSTSYYMGGKGIGSGSNDYAQFVMPTTGYANMVLSFRLRASNTGAGSFQMQYSTDGVDFKNLSTGTYAYKYTKYVGGEPQEVSAAEKITDGVAKTSLAPANYISFTFDIPNEAANADRLYIRMVPGSLSAKGDKAPAAGGVIRMDTVTVTGNPLIASDLCGYVAAEPQSGVIAVGSELTLTSATEGVTIHYSVNGGAEQIYDASAKPKLADLPAVVTAYATKDGYKDSIRRTFSYQQAQVATVKATPNGGSVVKNTAVNLTCETEGATIQYSADDGATWQDYTEKLVLTELPVTYKVKAVKDGYLDSSVLTLSFTERTNEKYQIYFGQLHSHTSYSDGAGSCEDAYQHATNVDNLDFVAVTDHSNSFDNADSASISDGSMSEEWKEGHALATQYTTSGFVCIYGFEMTWSNGLGHINTFNTEGFQSRTQNEYKTYSTALQNYYATLKTQPDSISQFNHPGTTFGDFSDFAYYDEEIDKLITTIEVGNGEGAIGSSGYFPSYEYYQRALDKGWHLAPTNNQDNHKGLWGDANTARSVVLVDSLTQENIYDAMRNYRVYATEDNDLSIYYTLDGYIMGSILEDGATGDTVHLSVDLSDPTDASIGKVQVITNGGLVLAEKNVSGNEETVTFDVKNDYSYYYIKVVEADSDIAVTAPVWVGSVEAAGIDSFSTDEVLPVRGEPLTVNLGLYNNENSELAIDSITFEVGGETVHEADLAAAGLGSVASMSTGSYSFDYTYDGVGSMEMTAVVHATMNGVQKVYKSVLKLSYATTEMVTKVIIDGTHYNDYVTGYYGGNVGNFTAIAGAKNVKVEVVTDEITPEMLANCALLVISAPAKKSGTANAGDYTVSHFEDSFIQMVKDYTDNGGTLITCGIADYQDSTSGQTATEMNKLLAAIGASTRLNSDEAYDETNNGGQPYRLYLKGTYNKDSRYLRGASEEQEYSAYSGCTVALDADAVTAGRAEALVSGYDTTYSIDCKDDAGNRVTGSPTYVEKGNMVALAHETLGSGANVFVAGTVFISDFEVKAELDNIWDLPYLNRTIAENILDEVKVELPLSTIAEVRKNGTAGDVYRVEGYVTAGTAAEGNTFFDTIYIQDDTAGIDIFPYAESGLAIGTKVEITGYVDAYQGDKELKVISSRILDEEPKVIAPEKLSAKDAMDYEKSGGKLVQVEGTVTDVLYDAAGTGVSQFWLDDGSGVNANIFIDGYILSATTGKNELASVVSTGKRVSAVGVVYAHPEGTSDEAVTCLRVRNCDEIVEVTSGETPDDTETPGNTETPDTETPGTDSSDSGNDSTDGTGNGGSVSGSVTVSDGQMTDAVTVASQNDWDPVRNRIGAASAGSTVTVLLADGVSVPGDVIAAVRGRDVRLVFRLANGIVWTIDGRSVTSDTISDIDFGVTINSHAVPDALARQTAAGRDYFQISLNHDGAFGFTAVMTLPVGTQYAGMYAKLYYYNEAKGRLELASSGKVDANGNVELTFVHASDYVVVLDQMPAVQTGDDTPLAAAVMMLLAGMVLLAAAARKKRIFLKMKELELKYGCNPNQKPSRIYMENGELPIKVLCGRPGYINFLDAFNGWQLVSELKKATGLPAATSFKHVSPAGAAVGLPLSEVERKIYWVDDMDVEFTPLANAYIRARGADRMSSFGDFISLSDVCDKETALVIKREVSDGVIAPGYTDEALEILKAKKNGNYNVIEIDPDYVPAPIEHKEVFGITFEQGRNELVIDEHFFDNIVTENKEIPEVAKRDLAIAMITLKYTQSNSVCYVKGGQAIGIGAGQQSRIHCTRLAGSKADNWWLRQSPQVLSLPFKPGIKRADRDNAIDLYIGEDYMDVLAEGAWQNIFTEKPPVFTAEEKRAWLDKNTEVSLGSDAFFPFGDNIERAHRSGVAYVAQPGGSIRDDHVIETCNKYHMAMAFTGIRLFHHMKMMLLAKELSSNTYPGRGIVIGRSGDGKYAVTAYFIMGRSENSRNRVFVEDGEGIRTQAFDPSKLTDPSLIIYAPVRVLGNKTIVTNGDQTDTIYELMDKQQTFEQALRTREFEPDAPNYTPRISGIMHIENNTYNYAMSILKSNNGNPDACNRYTFAYQNPVAGEGHFIHTYMGDGNPLPSFEGEPKLVGIEGDIDTFTNTVWENLNADNKVSLFVRYIEIENGKYETRIINKNVMAEIRKIIFIKNAVETLGYFSEQIARELERNGYETCFIDYERMYESMDVMLHFLDREETALVTFNFIGLRGEAVFQTESGRSIWQEENLPILNILVDHPLYYHSCLKEAGERMRVFCVDREHVGYVRRFYPGLKVEFLPLAGNELLFSHGDGEHGTHRVDVPEPVPYGRRTVDLVFTANYVSMEMLEEKVKALDDDYRIFYRRITEDLIADPAQSVDAVMERHIRNELGAVPEEQLCAAMSGMIWIDLFIRSYVREKVVQTLADAGIIVRVFGADWEKIHCKKPQNVRTSGGKVNSAACVQAMRDARIALNVMPWFKDGAHDRVFTAMLQGTAALTDDSRYLREECRDGENICFYSLRALQQLPDQVVSLLEDPVRMAELAERGYRMAEKRHRWKNRAGLLMQALRDIDKMINIWEVNETNKMVEQENLDVRTITIGISLLECIDSDLKKLNENIYNRITTVAKDLAAVGEKIENEYGIPIVNKRISVTPIALVGGAACKTPEDFATIADTLDRAAKAVGANLIGGYSALVSKGMTKADEMLIHSIPMALCRTERVCSSVNLASTKTGINMDAVKLMGEILLELAEQSKDRDSADCMKLVVFCNAPDDNPFMAGAFHGVTEADAIINVGVSGPGVVKTALEKVRGENFEVLCETIKKTAFKVTRVGQLVAQEASRLLNIPFGIVDLSLAPTPAIGDSVADILCEIGLEYAGAPGTTAALAMLNDQVKKGGVMASSYVGGLSGAFIPVSEDQGMIDAVQAGAITLEKLEAMTCVCSVGLDMIAIPGDTKATTISGMIADEMALGMVNQKTTAARLIPVIGKGVGDTVEFGGLFGYAPIMPVNQFSCDAFINRGGRIPAPIHSFKNMENTVDKVIITVVGKDTVGIIAKVCTYLSENHINVLDISQTIVSGFFNMMMIVDMSQSSRTFGDCQKDLDAVGEQIGVSIKCQKEEIFEKMHRIMIKESDIQNYLYARNIPYTDHASIYAVILPKYSFMRTMMATMLEVQHFVIHFGRTGISVIVVNDLTGRLDPYGFLFFPGERIQSVQFFRRVTHDQLVIRLTDGVRVYRVNKRMMMLPWHKSNLKALTYKSPVYYNQCMELCSIASGSSGNCICVGTDECHVLVDAGISGKRIESGLNSIDLKTEEMQGILITHEHVDHIAGLGVLARRYGLPMYATPGTIDAILHTKSVGTIDPALFHEIHAEEDFTIGDMTIEPIAISHDAAEPVAYKMKQPGKSMAVMTDLGIYDDHIVEKLKGLDVLLLEANHDVHMLQVGSYPYPLKQRILGEKGHLSNELSGRLLGEVLHDHFGTVFLGHLSKENNYAELAYETVRLEVAMGDNPYKGDDFPMYVAKRDEPSELVRFMSDTSVFDQPLVFGLDIGTRNVVGTVGYKTENEFVVVAQYMLEHETRAMLDGQIHDIGRVGHTIAKVKEELESQIGQELTEVCIAAAGRVLKTVTTNISYDFPEETVVTGEDIHTLDLLGIEKAQSILKEMNDTRYKFYCVGYSVMKYFLNDEPFSSLESHKAERISEDIIVTFLPEDVVDGLYAAVGMAGLTVANMTLEPIAAINVAIPENYRLLNIALVDIGAGTSDISVTRDGSIIAYGMIPLAGDEITELIVQSYLVDFNTAEQIKLSSGMEDQVTYKDIMMIEHTIPSKDVWKLTEPVVDKMTTEVAAKIKELNGDKSVSAAFIVGGGGKIHGYTEMLAEKLDLPAERVALRGEEVLQEVTFLQTEIQKDPLLVTPIGICLNYYDQRNSFIMVRFNGERIKLYDNNKLTIVDAALQAGFPNEELFPKRGKELNFTVNGTPRIVRGELGESAEIYMNDRLVNINTPLEPNSDIVIEASTQGEAAVCTLEQLDEYSSSDMKVIVNGRIVRCPKCLEVNGSLELPSYEIQEGDAVETRSFYTVEQLAAFMDVEVDIDHEILVNNRVATMESLVYENFSVDWVVLSFGAAAVDPAELPVAEQPVTAAAGGTEQTADETLAETVEEVDAAESEAQTGTEAEEAEHGMSQEPSSVTDATGAESAVEQPAEGEVQQASQKTDLGLVVFINQQPVRLTGKKSYIFVDIFDFYDFDLTASAGRAIITKLNGQQAQYSAVLSEGDQIELRWQEINRMRFIGITGGVGAGKSEILGYLAKKPDTRVMLADEIAHELMSPGTECYDRICETFGAEDIFLPQGGLDRGKLAAVIFSDEAKRRQMNAIVHPAVRVYVEKEAAREKQGGKRKLLVLEAALLIEEHYDEICDELWYIYTREDIRRERLMASRGYSTEKVDRIFASQLTEEVYREHCRVVIDNNGSVAEAFAQIDRALSEKKMSEKLVLIDGHSILNRAFFGIPDLTNSEGLHTNAVYGFLNIMFKILEEEQPDYLTVAFDVSEPTFRHKMFAEYKGTRKPMAAELKQQVPLMKEMLRAMGVTIIEKGGYEADDLLGTIAKRSEAAGVEVAVVSGDRDLLQLATDHIKIRIPKTKRTGTEIEDYNAKEVLEKYQVTPTEFIDVKALMGDTSDNIPGVPGIGEKTATAIIAKYGSIENAYAHVDELKPPRASTNLKEHYDMAQMSKTLATIDIDADIAYKLADAHLEQVSDLYTEEAYLLCKRLEFKNLLGRFSVEAPKNTAEEHFKKIEKAQEAEAFFASLRGKACGFYVVPQEETHDAHTEADGQMNLFGSFAMQNSGEEAGQQETAGSCHIPDFLGLAVACGEEEICYVEASEALPCRKIRELFAGSAAASYATLDLKPQLKELGMLEKKCLGTISEENLFDNTIAAYLLNPIKNEYPYEDIAKDYAGLMIPSRKDLIEKLTYEKASEKKPEEFLKCICYMAYVAYKTREPLEKELADTGMDALFREIEMPLVFTLADMEKEGIIASGEALKEYGDRLAVRIDELERKIYEEAGEEFNINSPKQLGVILFEKLSLPNGKKTKTGYSTAADVLDRLAPDYPIVADILEYRQLTKLKSTYADGLVNYIAEDGRIHTSFNQTITATGRLSSTEPNLQNIPMRIELGRLIRKAFLPKTGFVFVDADYSQIELRVLAHLSGDEKLIEAYRNAQDIHRTTASQVFHIPFDEVTDLQRRNAKAVNFGIVYGISSFGLSQDLSITKKEAAEYIERYFETYPKIKGYLDGLVAEAKEKGYVTTMFGRRRPIPELSSSNFMQRSFGERIAMNSPIQGTAADIIKIAMNRVHDRLLAEGLKSRLILTVHDELLVETAVEEEQEVRKILAEEMHGAAQLSVMLEIDVHAGSDWYQAKMIQERLSALREEMKKRKIDIYIVPTADFHESEYVGEHFKARKFITGFTGSAGTAVITLTEAGLWTDGRYFVQAEKQLAGSTVTLYRMGEEGVPTVDEFVEKELPESGCIGFDGRVVNGSWGRKLLAIAEKKKGSLYVTEDLIDLIWKDRPALSKEPLFLLEEKYSGKSTADKIADLRKVMEKEGANVHILTSLYDIAWLLNIRGGDIDYVPVILSYLVLTDKECIWFLQEEVVDEKIAAYLKENHITTRPYDAIYDYVKEIPADACVLMNGNTVNYRITSSLRKEIRIVDQPNPTEIMKAVKNPVEVENIRKAHVKDGVAFTKFMYWLKTNIGKIPMTEISASDYLEARRREQDNFIELSFDTISAYGPNAAMMHYAATPESDAELKPEGFLLVDSGGHYFEGTTDITRTMALGPITDEMRLHFTTVCRSNMNLANAKFLYGCTGLNLDILSRGPLWQMGIDYKCGTGHGVGYILNVHEGPNGFRWRVVPERHDNGTLEEGMVTTDEPGVYLEGKYGIRTENELVCHKAEKNEYGQFMNFENITYAPIDLDAIDPDEMTGREKKMLNDYHAMVYKTLSPYMTPEENEWLKKYTRAIMSEKEIEVYGKQVDEIKIRPYEHHAKYYETDQMGIIHHSNYIKWMEEARMDLMDQIGLSYKEMEAMEIISPVLSVSCEYHSMVHFDDVVVIEPRITKYNGIKMEVEYRMTDKATGELRTTGTSSHCFLNRSGRPISLKRSYPEIDTKFFEYTDIMTTENILKIRDKIRKKKELPHVQKPVVVNGRKLRTLSADIEILNGMWDNVRVGNEPGEAIVYVLMQTFSRKKCSHFSPTNIPSAFPHEIPKCILIILLIKAVKDNIQDDVSKELDTMKHFVIISGGTIDDSFADRWFEEEKPDAVIAADAGMEYLYRSHRVPDVIVGDFDSVGTEALAYFKTLPGVAIQKLIPEKDDTDTESAIRLAIRRGAERITLLGATGTRLDHVLGNIELLGIGLKAGIPIQICDAHNRIRMIDRGMTLARKEQFGTYVSLIPYTECVEHLTLKGFKYPLTDACLRGFCSLGVSNEIVADTAEISFEGGILLVVESKDRMNCLSPSILSADFSRLGEQIRELDEAGAQYVHIDVMDGMFVPSISFGLPVIRSIRPCTDRIFDVHLMIEEPGRYIEDFVGAGADLITVHAESCKHLDRTIASIKERGILAGVALNPATPLQTVEYVLEKVDMVLIMTVNPGFGGQKFIPYTLQKVRDLKKMIDARGLKTDIEVDGGVNLSNVEEIMSAGANIIVAGSAVFNGDVAENTQMFLDILNSMDKNMQGKIVKGISGFYYVHVAGSGIYECKAKGIFRNQKIKPLVGDNVTIAVLDEEQMLGNIEEILPRENALIRPAVANIDQALVIFAAAKPKPNFNLLDRFLIMMEYQKVPVTICFNKCDLLTGEELHAFSDVYEQCGYPVVYTSAREQRGIDVLLERLEGKVTSVAGPSGVGKSSLINCLQPERQMETGAISRKIERGRHTTRHSEIIPIKEQTYIMDTPGFSTLDIPGLEKEDLWWYYPEFEEYEPNCRFKGCSHIGEPDCGVKEAVEAGKISRLRYENYRQLYQELKEQKKYMLTEGMYIADRYEIIGKIGAGGMSDVYKAKDLTLGRFVAIKVLKPEFSEDLNFVTKFRTEAQSAAGLEHPNIVNIYDVGSEKGMHYIVMEYVEGITLKTYIEKKGQLSFKEAVSIAIQVGRGIEAAHSKGIIHRDIKPQNIIISTEGKVKVTDFGIARAASSNTISSDVMGSVHYSSPEQARNGFVDGKSDIYSLGIVMYEMVTGRVPFDGDTTVAVAIQHLQEEIVPPSAYAPNLPISMEKIILKCTQKNPDRRYESMTALLTDLRKALVSPNEDFVVMVPATNQDKTRIIGEDDLKQIKEEADSLYLKADQAVHARAEEMNRYDEDEDDEEDVDDDELDDEDDGDLNPKMEKAITIMGIVAAVVIVIIIIVIVVNLFGGIKSKKQSDTETSRTETTQTESQNEDTVTVPDFRGMTYADAQTEAEKKGLKLENKGEVSSDDYDEGEIANQDPESGKEVEEGTTIGVVISNGKGSVAVPNVTGDSEDDAVSALEKEGFKPNKTYAYDDSVEEGKVISQTPSAGDKAKTGDTITIVISQGAEAVTVPDVKTTYKSEEQARALLTDFNVSVKTAYSDTLPEGIVMDQSIDPGKQVEKGSDITITVSMGPSPSQSVTATTYSFKATINLPADTSNVSGATITLYDTSGNVLGQWDKAITDDFSISKTGLLAKEGYLVISWLDLNGNKINDQTTSTYQFTPESMKTFSMTHVGQRRETNQDYMYTSETSVGRLPDLFLVADGMGGHAAGDYASRFTVEKIVEYVTESEESEPVTVLGEAVRYANEHLLAEANADASKAGMGTTIVAAVVVGDKLYTANVGDSRLYVINQERITQITRDHSLVEEMVRLGEMDKEDAKVHPDKNIITRAIGVLPEVSADFFETVLVPGDTVLLCSDGLTNMVDDTDIKRIVLGQRDIVEKTQRLIDAANENGGKDNITVVLIEPFSDETRMEKTDIKSLNLEELTAFVESIGEKKFRAKQIYEWMHRKHVASFSEMTNISAALIEKLNQNCTLTSLKKADVQISKIDGTRKYLFLLDDGNVIESVLMRYKHGNSVCISSQVGCRMGCRFCASTLDGLVRGLRPSEMLDQIYQIGTDIGERISNVVVMGTGEPLDNYDNLLKFIELLSDENGLNISQRNLTVSTCGIVPRMRELADKKLQITLALSLHASNQEKRLQLMPVANKYDIKEAVDACRYYFEQTGRRITFEYSLVAGVNDTAEDAAELAELVRGINCHINLIPVNPIKERSYRQPDDGAVHAFQKKLERNGLTVTVRREMGRDIDGACGQLRRKHMHKEQEMEHTGQETGGVGQEMTTDSVNTRELILEILLEVTEKGQYSHLVIRSVLDKYQYLDKRERAFLTRVAEGTIQRQIELDYILDQFSKVKVRKMKPVIRAILRMGVYQLKYMDSVPASAACNEAVKLAKKKGFGQLSGFVNGVLRGVSRSLDQLTYPEESADAVKAWSVCYSMPEWIVAQWIGDYGKERTKEILAASLLEAPITVRTNLERITPEVLAERFKEEGVTAVPLDTEKYPGLSYAFTIFGFDHLNGLSSFQEGLFYVQDISSMMVAEYAAPKEGDHCIDVCAAPGGKSIHLAEKLRGTGHVEARDVSEQKVALIDENIKRCRLTNITAKCQDATVLDEASVRTADVLIADLPCSGLGVLRRKTDIKYRMNPEGEESLVALQRQMLSVVCEYVKPGGTLIYSTCTIHTAENEGNARWFEQTHPEFTLDTMRQMFPEEHLGDGFFIAKFKRKQDNGMPYSYYYWGFDPTYILVLIGAVICLVASARVKSTYNKYASYRSMSGMTGAQAAERILHSAGIYDVSVQHVSGNLTDHYNPSNKTLNLSDSVYGSTSVAAVGVAAHECGHAIQHQQGYVPLALRSAIVPVANIGSTLAWPLILIGLFFTSNTGAFLIDLGILCFSFAVLFQLVTLPVEFNASHRALRILGEQGILSDSELPYTRKVLKAAALTYVASAAASILQLLRLVLLFGGRRRDDMRVIFMGTPDFAVGTLEEIIKAGHEVVLVVSQPDKAVGRSKALRYTPVKACALEHGIEVYQPQKVRDSECIERLRTYHPDIIIVEAFGQIIPRAILDMPRYGCVNVHASLLPKYRGAAPIQWAVINGDTVTGVTTMRMDEGLDTGDMILKEEVGIREDETGGSLFDRLAEVGAKLCVRTMEAIEAGTATYTPQDNSQATHTAKIYKELGSIDWKQGAKEIECLIRGLDPWPSAYTRLGDKMLKIWKAKVVPEESGAEPGCIVKVEKDHILVQTGKGMLAISELQLEGKKRMPVEAFLNGYEIEEGTYFKKGMALRTIRIQGDPVLTKKCREITEITPKIRELAEDMLDTMYEANGVGLAGPQVGVLKRIVVIDIGEGPVVMINPVILETSGEQTGDEGCLSLPGKAGTVTRPNYVKARAFDLDMEEYEIEGTELMARAICHELDHLDGHMYTEKVEGPLHEVTYESDEEEMAEYAKVIVDISQEKLDKTFEYRIPPYLTQRIAVGMQVYIPFGSRRITGYVVELSDEAEYDEDKLKNIAGIVTDSVPIESHLIALAGWMREHYGGTMNQALKMVLPIKEKKKAVEHKRVRLALHPVEAKNQLGAYERRHSTARAKLLRALLEEEELDWDLVTHKLGVSGSVIRAMEESGVVKVIRETQYRNPVSHLTSRGYGLTLNDEQQEAVDAVWSDYEKGIRSTYLIKGVTGSGKTEVYMELIAKMQKAGRQAIVLIPEIALTYQTVLRFYNRFGDRVSILNSRMSPGERYDQFLRTKNGEIDVMIGPRSALFTPFANLGLIIIDEEHETSYKSETVPRYHARETAIARAAMLDASVVLGSATPSVDSYYRAKRGEYRLLTLTKRVKERPLPACGVVDLRQELREGNRSILSRRLDGLMEQRLRAGEQTMLFINRRGVAGFVSCRACGHVIKCPHCDVSLSQHANGRMVCHYCGYTEPVPVQCPACGSKYISGFKAGTEKIEMVVRKRFPEARVLRMDMDTTRGKEDYEQILSAFANHEADILIGTQMIVKGHDFPDVTLVGVLAADLSLHVGDYRAAERTFQLLTQAAGRAGRGNKPGEVVIQTYDPEHYSIETAKAQDYDAFYEQEIAYRKIMLYPPVWNMLVILCASKSEEAADAMAAELAAAADAYTGKNTKEKVYLVGPVDAAIAKVNDIYKKIIYLKAENYDTLVKIKNRTEVYARESRYYKNVTVMFDFNPVNGFMRLNQLLKHLTYEHVQGSQSREITDICYHSGNVREGSLFVCLKGLHNDGHDYLQGALEAGAAAVVVAAENVVPLDNDALLYTEQFGVRIAEIIDRWQVSVVIAADTRHALAELAAAFFDYPAAKLRMVGITGTKGKTTTAYLLSAILRESGHKTGMIGTIAIDTGDGVLPAVHTTPEAYEIQKYLAQMVDNGCDTCVMEVSSQGLKMQRVEGIFFDIGMFLNIEPDHIGEGEHASFAEYLFCKSRLMRQCRIGIVNRDDPHTERILQGHTCSVETFSLRHPADVTAENIRFFMQSGELWGSFLVRGKTAVYPVRMQLPGTFNVYNALAAIKAAGHLGAAESDICLALRSAKVPGRCENVRQSEDYAILIDYAHNEMSLKNLLEMLRGFKPRRLIVLFGCGGNRSKLRRSKMGETAGHLADFTILTSDNPRWEDPEEILDDIEDGIRGTGGQYVRIADRREAVRYAMAHAMENDMLVLAGKGHEAYQEICGVRYPLSEYELVEEARRSPGMGENTDRSEVDRWRNMRRMRGRNFLICGLTGWCMEILFTSAGSLARHDGRLIGQTSLWMFPIYGMAACIGPVYAKIKKLPALLRGSIYTVGIFSFEYLSGSLLRRHHFCPWDYSSARANVNGLIRLDYAPLWLGAGLLFERILVHANRLTMAEETNFSQGEAEEVKYQERKRLLFFGLPWTFTKYTISQDMITVDEGLIKVEENDCYMYKVQDVKLTATLPERIFGMGTIICYTGDVTDKELRLSHIKHAKEIKNYLLKASEAARIKRRTLNMQDIGAGIADDVDLMRHLMSPLDFSVDELDKLLDLANDIEKYPQKYAHACEGKKLATCFYEPSTRTRLSFEAAMLNLGGSVLGFASADSSSAAKGESVSDTIRIISCYADICAMRHPKEGAPLVASQKSRIPVINAGDGGHQHPTQTLTDLLTIRSLKGRLGNLTIGLCGDLKFGRTVHSLISALIRYPGIRFVLISPEELRIPSYIREDVLAANNIPFTEVERLEDAMPDLDVLYMTRVQKERFFNEEDYVRLKNFYILTKAKMDLAKEDMLVLHPLPRVNEISVEVDDDPRAAYFRQAQYGVYVRMALILTLLDIRVDMLNISGIHEGFVLDHIKAGMSLQIYHDLKLDGLDCTVAIIKNAKSSKMGKKDILKVECPVEALDLDILGFIDHNITVNVIKDDKIYEKKELHLPKQVKNVITCRNPRCITSIEQELDQIFLLTDEEKEVYRCKYCEEKYRNPNRRMSKTYETVIGLEVHVELATKTKIFCGCSTAFGGAPNSHTCPVCTGMPGSLPVLNKQVVEYAMAVGLATNCTITQYCKFDRKNYFYPDNPQNYQISQLYLPICRNGGVEIETAAGKKTIGIHEIHMEEDAGKLVHDEWEDVSIVDYNRSGVPLIEIVSEPDMRSAEEVIAYLEKLRLIIQYLGASDCKLNEGSMRADVNLSVREAGAAEFGTRTEMKNLNSFKAIARAIEGERARQIELIEEGKKVVQETRRWDDNKESSHAMRSKEDAQDYRYFPEPDLVPVVISDEWIERVKARQPEMRDEKLIRYQEEFGLPKYDAEILTGDKSFADLFEAAAAICGKPKKVSNWIMTETIRLLKENEMDPDQIRFSPEHLAKLVDLADAGSVTNTVAKEVFEKVFKEDIDPEAYVKEKRLLTVNDEGALRETVAKVIAENPQSVEDYHNGKEKAIGFLVGQTMKAMKGKANPALVNQILKELLMSLMSLTAVELGRKIKEKEVTVEEAVTAALDAIEKREAEVHSFVTVDREGALKRAKEVQAKIDAGELTGPLAGVPVAIKDNMCTKGLLTTCSSKILYNFVPTYTAEAVLNLEKAGAVILGKTNMDEFAMGSTTETSAYGVTKNPWNTGHVPGGSSGGSCAAVAAEECSYALGSDTGGSIRQPSSFCGVTGIKPTYGTVSRYGLIAYGSSLDQIGPIAKDVTDCATILEAIASHDVKDSTSVQREDYDFTTALVDDVRGMKIGIPRDYFGDGLDPEVKAAVLGAAKKLEEKGAIVEEFDLSLVEYAIPAYYVIACAEASSNLARFDGVKYGYRTEQYDGLHNMYKKTRSEGFGAEAKRRIMLGSFVLSSGYYDAYYLKALRTKALIKQAFDKAFEKYDVILGPAAPTTAPKLGASLSDPLKMYLGDIYTISVNLAGLPGITLPCGTDQSGLPIGLQLIGDCFAEKKIIRAAYTYEQTRSYEHSPLARMTVKDLGTKRLETARLILRRFTLEDAQKMYENWAGDPEVTKFLTWPTHESAETSRQILKEWVAAYDNPEVYQWCIEEKESGEPVGSIGVVSRNEKAQSCEIGYCISRSRWHKGITTEALAEVMRYLFEEVGVLRLESRHDPKNPYSGEVMKNCGMRYEGTRIRADWNNTGICDCALYGMVTYVGDGNAVQLTVDAQTEGAAQKAVDSAQTEGKQQGEQTGHTPKNVISDETIEYVGILAKLELSEEEKEQAKKDMGEMLDYIDKLNELDTEGVEPMSHVFPVNNVFREDVVTNGDGSADTLANAPVKKDGGFKVPKTISMNIEEQIADYKPYNEQEAHDQAVMRQLFATQPDLFTRENQVAHMTASSWLLNATHDKVLMIYHNIYHSWAWTGGHADGDRDLLAVAKREAMEETGVTEIRVISEDIFSLEILTVDGHEKRGVYVPSHLHLNVTYLLEADEAEVLRIKPDENSGVRWFSLEEALAACSEPWMIERVYKKLNAKVRERFGGTHGMQRGEMEYVTGVSKKETVEISEILSGDFEGKQVKVNGAVHTIRDMGEVAFVILRKREGLLQCVFEEGKTKFDLKELKEASTIEVEGTVRAEHRAPNGFEVRLDTICVLSEPAAQLPFAISKWKLPTTLETNLDHRAIALRNVRERAKFRIQEGVVRGFRDFLYSEGFTEIHTPKIGAKSAEGGANLFRLEYFHRPAVLQQSPQFYKQMMVGVFDRVFETAPVFRAEKHNTKRHLNEYTSLDFEMGYIDGFEGIMAMETGFLQYTMKLLERDYAKELKMLGVTLPNVEQIPAVRFDEAKQKVAEKYHRQIRNPYDLEPEEEALIGQYYKEECGADFVFVTHYPSKKRPFYAMDDPTDPTYTLSFDLLYHGLEITTGGQRIHDYQMLLDKIEKRGMTTEGMEQYLAVFKYGMPPHGGLGIGLERLTMKLVGEDNVRETTLFPRDLSRLEPMIRVLFICHGNICRSPMAEFILKDKVEKRHLTSRFEIASAATSTEEIWNGKGNPIYPPAQAELRRRGIGGTAYTDFSGKRARQVTREDYEHYDYLLCADTANIRNTIRITGADTEGKIRLLLDYTDRPGCSIADPWYSGNFDDTYRDVDAGCEGFLAYLKEKGAIMSEKRRDNRNRILREGEYQRKDGRYRFRYIDEDGKEKNVYSWRLDKNDPMPKGKKRESSLREKEKQIEADLFDRIVTNGGNYTVLELVEKYVSLKTGVRHNTVAGYKTVINMLKKESFGNLRIDKVRLSDAKAWLIKLQQIDGRGYSSIHSIRGVLRPAFQMAVDDDLLRKNPFEFELASVIVNDSVTREAITRKQQRDLLKFIQEDKHFSRYYDAIYILFHTGLRISEFCGLTVSEIEFGEMRIKVDHQLQRTAQMQYVIEEPKTDKGIRYVPMTEAVAACFRRIIANRKTPKVEPMVEGYAGFLFLDKNDMPMVALHWEKYLEHIIQKYNRIYRIQMPKVTPHVCRHTFCSNMAKSGMNPKTLQYIMGHADISVTLNTYTHVNFDDAKEEVYRIANSMANNKMNIEGKNYSDVPVWRRYTLTIEEAARYYHIGEGKLRTLIDTHPNEDFYVMNGNRALIKREKFERYLDQATAVMIQAYLDKYTGNMVCSKQLYKEALNHAFDEPKQWEIREINEIMNQCITGWRYFPNPRMFSEYGRQKGWERENPATDSGNPSEKTMDGFVEVTEQMELPFMQPPQSIEEIKAGLETTEKGGVRQSIRNCLTVFQRDPLLSGAIAYNILTDRKDIIKPIGFHRDSTALNDTDMKYLLLYLEETYGLTNEKKIDNAIGIVANENKYHPIRDYLSSLVWDGTERIRFCLRHFLGADADDYTYEALKLFLLGAISRAFQPGCKFEIMLCLVGGQGAGKSTFFRLLAVRDEWFSDDLRKLDDDNVYRKLQGHWIIEMSEMMATANAKSIEEIKSFLSRQKEVYKIPYETHPADRPRQCVFGGTSNALDFLPLDRSGNRRFIPVMVYPEQAEVHILEDEAASRAYIEQMWAEAMEIYXXXXSWLSALPCSGISKNTSGILCRRTPKPEMNVFEAVKQSVTTRQAAEHYGIHVGRNGMACCPFHNDKTPSMKLDRRYHCFGCGADGDVIDFVAALYGLGKKEAAVQLANDFGLSYEDWKPPGKVKKPKPRQKSPEEQFQEAKNRCFRILADYLHLLRAWRKDYVPHSPEEAVHPRFVEALQKQAQVEYLLDVLLFGETEEKAALITDYGKDVIQLEQRMAELAAADAARTKKHHERYAAAPEHKDWTRAGQNRGTSQDLKAVSEALSYLRQKGLSTVEDLEAFLESSGKSAADYRNQMKPKEARSKVIDGILASRTDCKECKPVYEKYQKIFFKKTKEKFKQEHPEVARYAKAAAYLAKHPDDKDSTQKELQEEQETLLEEIAALKIPLTEVQEDLKKLRDIRYWVRKATPGTEESKEPPKKQPIKEVLQDKADEKKAQRTAPAQAKHRQQDMELRKYYYLKLKENFFDSDSIVLLEDMKDGILYSNILLKLYLKSLKNGGKLQLDEHIPYTAQMIATLTRHQIGTVERALEIFRQLGLVEQLDSGAFYMTDIELMIGQSSTEAERKRAARLENKALLPPRTKGGHLSDIRPPEIEKEIEKEIEKEIEIEKEREGETGRPAPAAYGRYNNVILTDTELSGLKTELPDKWEYYIDRLSCHIASTGKQYHSHAATIYKWAQEDTAKGKAAPKQGIPDYSCKEGESLMKNEIEAMITDITTTTAEAEDYTGEDGLLYCGKCHTPKEAYFAERKTCFGRDRHPAECDCQRAAREKQQAAESRQKHLEKVEDLKRRGFTDPAMRNWTFEHDNGRNPQTETARFYVESWETMQAENIGYLFWGGVGTGKSYLAACIANALMEKEVAVCMTNFATILNDLAASFDGRNEYISRLCSYPLLILDDFGMERGTEYGLEQVYSVIDSRYRSGKPLIATTNLTLEELQHPQDTPHARIYDRLTSMCAPVRFTGSNFRKETAQEKLERLKQLMKQRKESLMKVQGNRYINNPEMIKNKVEKKTTVPQNIISEDDVKISDSARKLVETARNKVSDFHTMHFSSINGEIREIPAEYKCENLFKLDLKAASISGEQSAFEGCSENQSEVFEKWLDENASEYLTEDEMKDLKEKINAMTADVDFLNAQEGYRGTSYESVFLLSASEAGLRKVNEMYVPEQLQAGFSDMIDEYVHFNDSARNSIMEKMTPDYMVVGIGSKTESYKYKSEIISDETAFYTNEKKEISGICNQFLNGKTDQKLFCNEMKDRLNDYYGSRYELRNQPEAVEGRVNNMLDKLQHMFGVMKTVTDVNTVNQLLTYSKQAEAGIHQKAIQMLLGAGNNKKQDSLSISDAARGFSKQSIAALIDKNANISNSELAYYFANYNNSSAILDAINFGENVSCGYNSDFKEYGVISFDLNGSRQVVPNYAVPKMNTSTMSGICAANNSLVLSNKSYYAWTTSSGGKYTWTVNNGRIGWAASESLLAENTNQKGTNYKWEMCKAGNILSDLAQGKSVWGYLYSNEEVLSVCEKVGISPGFFSIDAGAGKHTYLLQESGKTINVDAKIKQLNDINWIEIGYKEGDTFSVYGKEYAIDSSGHINVSAEDEFTSTEIKYPSRSIMAITGINNSSYTSYYASNYKNTVKKTDSEKDSTNTKDGNVTTSTVELKTSRPGVTKTEQIKTGYSNVNDYSKYLQGKYHYMNIGLTSMQGIPTTVSVSSAFLQKCMNDPEKAKYLEENLAAIPDCTKDTINGCLGTVTNQSYMIDANGNIIETASCTNDPDGKIAKENAERKAKENREKEEKVKEKRAAKKAEEEKAAKQRAEKSAERKETGDYTLSITGNDVKSMTQSLVAGSVSISAPDRSSFDIKAMAGVEENDIDRLLVNPPEKIEIEVKYKIAVTVMELRFWLKDCESPIENFIIDEEAAPVVKQIYNFCLAGNGPTKIARMLTEQQIPTPGTLEYRRTGSTRRYHPGYECKWATNTVMIIYKNILSQLKDAGYNTTRIRKEMRKEFIKNVLDVEVNGFACTVRYIVSAMYNVIDDDGFATIEQKIVEDVTFSSDELEKEGGTSKVLEDLKECYAPLCCSMTRKDEIEMEIRNQAVRLYPSCVALFELPVMVYTQIVKDNDTRKRPYRVSIERCSKVIQTMNFMTDGERKIEVADLISLEEIKKEHKAGEYLAIGSDGKEYEASYDPRFLTDGVMFFSIPSDVKILGYLKNKNAYCNKTIPCCGCADMDICRGKVKNNMDRDGVNGVYNRPYESLYSRCFRWFGLWAEWQHVLENGANALKSTDGQILNGIRNRMAYWLSELALSEYTMDDVREEARMNGMDLDDMMMELPPVMDENYMMTETKQTSTTKTDRRPDCVTEIRMGNSVLTVSGFFKQGATDTAADKMMKVLEAEAATQKTAIFRKETAQEKLERLKQLMKQRKESLMKDKELRKLIGSRAKQRRLELNLTQPYVAEKMGVTASTILRYENGSIDNTKKMVLEGLSEALHVSIEWLRGETDEYETDITDKKELQIRDAMGDILKQLPLDLSKKEDAFSKDLLLLMLKQYNLFLESFQFACKNYKGNTNEADIAKVMGFESNDEYNEIMFLREITHTVNAFNDMADIVRLYSKKPEMAEQRLENLLSEVLYEDSDSVMDRDGVNGVYNRPYESLYSRCFRWLGLWAEWQHVLENGANALKSTDGQILNGIRNRMAYWLSELALSEYTMDDVCEEARMNGMDLDDMMMELPPVMDENYMMKSYKDFAKESIGSSDIGALVLVGGGAGDIQNQFLFFGEDGSYRAYMVTGADVEIGSHYEKVAAFKGWLRIYDDDGKTFEKSAAEINVYRSGDFGCIIQTLMTRKDEIEMEIRNQAVRLYPSCVALFELPAMVYAQIVKDNDTRKRPYRVSVERCSKVIQTMNFMRKTGLKFIWEKGSKNDNAIKVFKENNISLEYDHFGNLTADFYGIGIFEKVEYEHIENDVFEICIAMIIYKNILSQLKDAGYNTTRIRKEMYYYSTVNNIVTTHSALLEKDGFDIVKVHFESKKGKVTYKTKKNAQTTAKASGSHNRKKQYILEEGTPIAPLVDMGVFTPEGKVVRTMYDKFRQINRFLEMVGDAVGDDTSETLHIIDFGCGKSYMNVRNEIKAQIIHAGMTMQEVVDLLSDEYGWSDSVSNLSAKLQRESIRYKEVLELAAVLGYDIVWQKKREKMGYGHIWTGHHKRNSERILEIADFSLFGVSAPLWSAEVAPNHKMYAAFTPVFSSYRKQQLSKLTCFRALKISGNGNSKVFDRRTKLFHEIVLLMAKNRKTPDMNLPVWFDGQNINEALFCEEFLHERRIIFANGAFFTPDGRVTDDLPLRGEIYDKLKFCAVNNIPRKITNILEVLKLEAQVPDFPPEQDRIHVFNGTLLLNGTFTEGRPAIVRSRLPVVYNPDAPAPVIWLNFLNGLLHAEDIPTLQEFIGYCLIPSNKGQRMMVIKGNGGEGKSQIGAVLSAIFGTNMKDGSIGKISENRFARADLEHILLCVDDDMRMEALRQTNYVKSIVTAQGKMDLERKGKQSYQGWMFARMLAFSNGDLQALYDRSDGFYRRQLVLTTKEKPVDRADDPDLAEKMKAEAEGIFLWAFEGLQRLVANNFKFTESDRIRENREAVKRDNNNIFDFMDSEGYIQCKADASISSKDFYEIYRMWCEENSLAPLKARSFSDAMIVNAGRFNLEHCNNITNSAGRRVWGFMGVEAVARPHINGFYDVSPCTYVPEEWREMTIYGTIKAAISVKQAAEHYGLKVNRNGMACCPFHNDRHPSLKLNEDYFFCFGCGAKGDVIDLVARLFNMSSYEAAQKLASDFGLDPKPPTAAAIAKPKRPYIRQFREDEMLCFRVLTDYLHLLEDWKVRYAPKTPEEALDDCFVEACQMHCPIEYMADVLTVGDLEERVALVDELMKEGKITFLQEYITRKKKEVAHHGEEPENAMNQELMTLDFWQDTVIYEGKTFPVGTLACDALNVPADTITKMNEQCEKINLLLGILNAGQDASALCPIAKEAALTMLDIISQTPPFSYMNISKHRERIEKVFTVDNALKYVEFAIKAVTNSLPFEEVPKYADAVMLQRYTAVCGHLAYSLEEYQKAMLDFAEQSDGNEADRTAEGFAKMFGTYFPPEFSITEGNAWMSTLNNSVQYVSVIRPGEKVAKXXXXXXXXXXXXXXXXXXXXXXXXXXXXXXXXXXXXXXXXXXXXXXXXXXXXXXXXNLRQVVSDHQRTAHQILWRLCTGGQAAPHLSADRQPERQRTTGACGRSSGETDLMKQIYEKRLNTINRYVKRGTLDADLAEVMKKLAKDKMLRALSNVAYTKGDYEKEMGQAALKKEAKLRTKMAQKYDLTDIGNALSRVMDNPMTKIIRSGSIGVLGVVNPVAGIVGGIGNDLLSEYNTFKLGHLLNGLASGFNLERRLNELYNYVNSSPEKAIIVANLFKQTVNAECPKVCVIYGLILANHLETLTEFTHEELIVCKALENATDYDLKNFKEIMENYLKPTSNGRRIVFPKDFADIAAFTTTCDWCVYNRIFVSRTAEWGEMEEGVLDMSTYYYEANPASVLLDNINAARQTWNYSMLNDFTWNMTGYIPKHQVNPHSDSIITYVAERIFQLEPEPPAVDSLNEYILSALQEKNLIHFSFFLHHYEPQLNKRIKDFLGVDGGDLYDTDRFIDIKLSCREQMLQKLMDYDLTKGAEYATYIYPFIRDAMLRFRMGEEKWSVSSLTNYKMVRSMARLYHNTKDAISEFVRKYNCDLALAEEYLKVVRGIRNQQPFYVTDEDGEETGEDVALDDTWNYADILWNGIQAEKVQRAFEKLNYREQTLLEKRLAICMTCGRVGSWKGRPTFEELAVMFEGSTASGAERAYRKAVDKLAELLVAEGAIHAVRLKQKSKIKRKKEIAAAIYEYQADCDGEWGDISLDFENGTAKIVRLADWDTMRTNRFANKAIAYLLNCENEKLPKETMVAFESMSKYLIENLFGIEGWSIAWYGVIIAVGMVLGVILAIYRARKQGLKDDLIFDFILLALPIAIVCARGYYVVFEWNSYSGDILSIFKIWKGGLAIYGGVIGGLVTAILFCRHHKFPLFRFLDLVVPSLVLGQAIGRWGNFVNQEAFGNLVTDSSLQFFPYAVYIDVLGEWHQATFFYESMWNLCLLITMLIVSRKNPKAGTLTCMYFVIYGLGRFLIEGLRTDSLYIIPGIRVSQVLSLFLICGGILLYIFFVRRNKTKNVYSGRYIRMKYTIKAGVLYKNESQLALARIKSVLLGPQRKILSIAGELLLTADVRYLDESKASSGDVRNREYLLTDNENQLVGSARPGYADGDDPDVVGWPICRMPGVDHANIVVNGEEYLLTMHNSQNYSLLNTCNSEVLRIMHKGIAGGWIVEDICGFVPEIICGIFIFCRYIEQENEFLIVMIYLELFWSFFQIGLFSIGGGYAAMPLIQNQVVDIHPWLTMTQFADIMTIAEMTPGPIAINSATFVGIQVAGLPGAVIATVGCVFPSCVIVMTLAYIYYRFRGLNMVQGILAGLRPAVIAMIASAGISLLIMALYGQRTLPNDLASLDLIAAIIFVIGIFVLRKWKPNPLWVMAGSGFAGIILYALVMLINIERTAFLEVNSLQKYKKLFFSTFELSACTFGGGFVIIPLMRKKFVEELGWIEEDEMMDLTAIAQSSPGAIAVNASILVGYHVAGFPGAMLTVLGTILPPLIIISIISMFYQAFRDNAIVNMAMAGMLCGVAAVICDVVINMAKTIFQKKRLLPVIVMLGSFVAVRFFSVNIIVIILVCGVIGAADTWHQGKMRKVGDKRMTIRHMIIFRTVCENGYNSTKAAEVLHMTQPAVSLAIKELEQYYGVHLFDRIGRRLQITDAGQHFLQYAIHISDLFSDMETGLRDWDSKGVLRIGASITIGSQFLPNYVKAFSELCPGLDVRVTVDQSERLEQKILANELDCALIEGIAHDPNIVSEAYMEDHLSVICGTDKGWTQGQVISIEDFQRQRFLLREKGSGTREVFNRVVEQAGFHITPVWEAMSTTALVNAAINGLGIAVLPHRMILPALRQGLICTVKVEGLSFSRNFHIIHHKDKFLTTSAKRFITLCRDFETDYPLPCYNGLYEMDRLISCEFNMDTACVELKFFDGSMIAIDTIAVENEVADNMYQRSELDYLIYNDPVAYAELILNGNPEAYLKTVTEYKSLYMKKGQIIEGIVECVEFPNKGIVRTEDGGRVIVKNVVSGQKVSASINKVRKGKCEGRLLEVLERSAKEQPETACIHAGECGGCTYQTLPYEEQLAMKASQVKKLIDDVIVPENTDYEFLGIKASPRQQEYRNKMEFSFGDAYKDGPLALGMHKRGSFYDIVDVPECRIVDDDFHTVLTVTLDYFKERNLPYYHKLRHTGYLRHLLVRKAVKTGEILVDLVTTTQIAEGGEAALLAGWKDVLCAAAYQGTLTGVLHTRNDSVADTVTNEGTDVLFGQDHFYEELLGLRFQITPFSFFQTNSLGAEVLYETAREFIGDALPSGTDADVAEHGKVVFDLYSGTGTIAQMLAPVAKKVIGVEIIPEAVEAAKENAKLNGLTNCEFIAGDVLKVIDEIEEKPDYIVLDPPRDGIHPKALEKIIRYGVPQMVYISCKPTSLARDLEVLQARGYEVKKVCCVDMFPATVHVETVVLLSKGEVDSKKIRVEFSLEDMDMSEFQDGATYPQIKEYVLEHSGLKVSNLYISQIKRKCGIEVGKNYNLPKSEDSRQPQCPPEKEKAIREAFKYFGMIMNKMEDLINMTKLNELLNKKEEVEEKKTSKVVWIFAIIGIVAAVAAAVYGIYRFFTPDYLEDFEDDFDDDFDDDFFEDDDDEEAPAKSEDKEETTEDMSIYDTLNEQQKLGVMTTEGPVLILAGAGSGKTRVLTHRTAYLIEEKGVNPYNIMAITFTNKAAGEMRERIDALVGYGSESIWVSTFHSTCVRILRRHIDRIGYDTNFTIYDSDDSKSVMKEICKRLNIDTKIYKERSLLAAISSAKDELVSPTQFALQASASSDFAKKKQAQVYQEYQAALQKNNALDFDDLIVKTVELLQTDPEVLAYYQERFRYIMVDEYQDTNTAQFELIRLLAGKYKNLCVVGDDDQSIYKFRGANIYNILNFEKHFPDAVTIKLEQNYRSTQNILNAANSVIANNVGRKAKTLWTANGEGEKIDFEQFDTAYEEADYVARDIASGVRDGKYGYGDYAVLYRTNAQSRLFEERFIVSNIPYKIVGGVNFYARKEVKDLLAYLKTIDNARDDLAVRRIINVPKRGIGATTLNRVSDYAEAYDISFYESLKRAEEIPSLGKSAAKIKPFVTFIQTMRSKLPYIGVADLLREVIEETGYVKELEAEGTDEAEARIENIDELLSKVVAYEEGEEQPTLSGFLEEVALVADIDSVGEENDYVVLMTLHSAKGLEFPKVFLAGMEDGLFPSYMSITSDNASSELEEERRLAYVGITRAMKELVITSARQRMVRGETQYNKVSRFVKEIPPELLNGEIKKPAYLENRERHTAEPVKKKRPTMRDQLSGQSMQARAFSSVHTEGGSLSYGVGDRVSHMKFGEGTVKAIVPGGRDFEVTVDFDAAGTKKMFAAFAKLKKVMDNDTKKFLSDLLAELQRIDYVRPEDIPNIDLYMDQITTFMDSQLETSKRHADDKILTKTMINNYAKNNLLPPPEKKKYTKEHVLTLIFIYYFKNILSISDIQSILNPITDKYFGKDGSYSLEDIYREVFGLEHQETQNLMKDLARKFNTSCQTFPDAAPEDAELLRNFSLICMLSYDVYVKKTIIERLIDTTTSDKSKTEKNKKMSKKLRTDAVDHLFDAILSLQNREECYTFFEDVCTVNELLSLSQRFEVAKMLRDQKTYLDIAEKTGASTATISRVNRSLNYGNDGYDMVFSRMQNTDKQMKKLKQFLFIFVPLLLVIAIQFLATYFAMGLSLLIENGWYSVTGSAGFLDIVDDAFSLWSSQRFNTGVLLIYNAMSIAVFGLWYYCRYGGNYRPVLRQTFHPAAIAGIVMLMPGTQYLTTYIMSFVASLFPHWMDAYESLLEMAGLDDQISILMVICSVIFAPFCEELVFRGVTMHQAKKCLPFWAANLLQALLFGIFHMNMIQGIYAFCLGLVLGYVCNRGGSIYYSLLLHMLFNFWGTVLSGLIPFGDTTFAFIFWFLFGIAMTVGGLVAFNFGIQRLQTAGRASAMPLSDIPSGTEMENWESYVRKVVPYVPGEQPQAERMIKLNTNENPYPPAPGVQRALAGFNPDTLRLYPEPTCKVLVDAIASYYGLGSDQVFVGVGSDDVLAMIFLTFFNSGKPVFFPDITYSFYDVWADMLRIPYETKALDDAFEIRVEDYYGENGGVIFPNPNAPTGILMPLDKIEDIIAHNRDVIVVVDEAYIDFGGVSALPLIEKYDNLLIVQTFSKSRSMAGMRIGYAMGNAKLIRYINDVKYSFNSYTMNRTALVLGVEAIRDRAYFEETRKKIIETREWTKKELRALGFTFGDSMSNFIFASHERVPATELFEALRREHIYVRHFTKERINNYLRISIGTREEMETFIRFLKEYLKEAMVSKRIQKALEGNSAIRAMFNEGREMAAKYGEENVFDFSLGNPATPAPKALNDAIRDLLDEADAKGAAGSLGIHGYMANAGYEEVRQAIAENLNERFGTKFTAHNLVMTVGAAGGLNIIFKTILDPDDEVIVFAPFFGEYRQYAANFDAKIVIVQPNLETFQPDLADLEAKITARTKALIVNTPNNPTGVIYKPQTMEQIGAILEKKQAEFGTDIYLISDEPYRELVYDGNKEDFLTKYYRNTLVGYSFSKSLSLPGERIGYVVVPDEAADAEELIRGIEISNRTLGFVNAPSLIQKAVARCLEEKTDVTFYDENRSRLYEGLTKLGFTCIKPEGAFYLWVKSPVENEEEFVNEGKKFNLLMVKGSAFGCPGFVRLAYCVSHETVEHSLPAFAKLAAVYGLEKMIQERILELTEYGLVTGLIEPQDKRFTINRLLELFHIDELEDEVTAAYEKRTPMTQESAEEALPQILAEMLDYAAEQMLIPDNTITYRDLFDTKIMSMLVPRPSEVVRRFYDLYEKESPQAATDYFYKLSRDTDYIRRYRVKKDLKWTADTEFGTLDITINLSKPEKDPKAIAAAKLAKQSGYPKCLLCKENEGYAGRINHPARQNHRIIPVTINQSDWFFQYSPYVYYNEHCIVFNANHTPMKIERATFGKLLDFVQQFPHYFVGSNADLPIVGGSILSHDHFQGGHYEFAMAKAPVEREITFKGYEDVKAGIVKWPMSVIRISATDKDRLIDLADKILLAWRGYTDEAAFVYAETDGEPHNTITPIARRRGDAYELDLVLRNNITTEEHPLGVYHPHVKLHHIKKENIGLIEVMGLAVLPARLKDEMADLEQAILDGVDIRADEKLAKHADWVEEFLPKYGFTAGSGLEGEITPERLHEIVQTEIGLVFKEVLTDAGVYKCTEEGRAAFMRFVDTVNAMIWEPVLAKFKELFGDEGEIGVYFAPGRVNMIGEHTDYNGGHVFPCALTIGTYGVARKRDDKKLRFYSMNFENLGVLESSVEGLKPEKEADWTNYPKGVMWAFGEKGMKVESGMDLVLFGNIPNGSGLSSSASVEVLTGFILRDMFGFDVTNQDLALIGQYSENKFNGVNCGIMDQFAIAMGKAGHAIFLDTATLKYEYAPIRLENAKIVISCSNKKRGLGDSKYNERRSECETALAELQKVVKINALGDLTEAQFEQYQDTITSPVCQKRAKHAVYENQRTIKAVEALQNNDVALFGKLMNDSHVSLRDDYEVTGIELDTLVEEAWKIDGVIGSRMTGAGFGGCTVSIVKDDAVDAFIEKVGTAYKNKIGYAADFYVVEIGDGPVKLAMFFPHFTLALFISVTGDIIKSTSCSFQLECLWNILFKKCGISNQPATASAMILVFPSLEHSTDCVRKSMARLAISAGTEKGTFVGEKCEHFFQPKFASDSVSLPRLDSPGACPTNMRKENPADIAIFEENAKRPFGMRDKIGYAAGDFANDLTFVIAALFMMKFYTDIMGVSAALVGTLMMVAKVVDAFTDVAMGQVVDRSPYTAKGKFAPWIRRFAGPVAVASFLIFAPYFADMPMGFKVFWMFFTYILWGSVCYTGVNIPYGSMASAMSDKPEERTMLSNWRTIGATVAQIVIAVILPMVVYTTDAEGHKVLGGTQTMIASAVCSVLAVVVYMICYHLTTERVKMQSAEGQKNVFELFKVLFTNRAFVGIVISALIFLLVQMTLSGMNNYIYPNYFNSSAAISVSSLLACVVVLVLSTFVTKLSDKIGKKELSAAGAFIGAAALFVGYIVHTKSVVVFICIYLFAYIGLAFFNLMCWAMIIDVIDDIEVKKGIRSDGTVYSVYSFARKLGQAAANGLTGLLLTIVGYSSATAFDEDVVNGIYNVTTLFPAIGFVLLACSLLFLYPLSKKKVLSNVAELTARKAKMNVFVPTPGSSEQITQMGHSAKYDYENGLPVLYLLHGAYGDAFSWVRYSNIDRYAQDRGIVVVMASAENSFYQDLRSGKKYKTFFTEELPLFIRNVFPVSREREKTFIAGFSMGGYGAWYLALSRPELYAKAASMSGALDIAGLYQAAAAGNNDNNPFHWEDCFGDPDKLAGSDYDLFTLYDRDVKNGCVPKLYQAVGRDDFLYPSNVYVRKLLEQKQADLTYEEDKGGHDWNFWDQYIQHILDWMLHDMCLHQCHCFSPYPFLSLQLWYQNRNSETTPFLLNNVCFFTYPAIFSHFCRMKYHDITPEMTIGDLVKSKVYGDFGTHIFTDMTPDHWNAPLASYGFEKVGFVPTLHRMEELAATGKNYLYPLYSEEERMSEWDKESPAFLHFPGPIAGRPYAVIIPGGAFNRQWGLVEGMAIAAALNEMGYTAFVLFYRTKQDAVVAKAIEDMYACIRQIEARADEFEVQAGHYMIGGFSAGATLAGEIGSTNFGWKSAGVPKPEMIFLAYTAVRMKDFYAGYTAFPAGHPVHDGAAAFLRRVAGPEITPEAVEPFDLTSHMDASYPPVYLTANEDDHTAPFSNSLTVAETCEKLGIPHKTRFGKTGDHGFGLGIGLEVEGWLKEAVSFWEEVRMAKLVAFYSRADENYFGGTKKYISEGNTKKAAEKIAELTGADLFEIVQEVPYAADYDTCIAEAKRDLKAKARPKVKNLPESLDAYEGSGLSGTVADIEKAAAGAAVTQGLAIHGSEVDHAGAMIERWVMTLQKKIARSVGKNLSFYLTGSILTAITIMLLVGAFAVSHSIYECFTPYFDETRVEDASFVTMTEIPEEEREVLEKAYDVTLERQQYTDLDYDGTRLRLFAATEKLDLYTVSEGRKIEAADDIVVTYRYAKANHIAVGDTLHLAGRDFQVCGLGMKPDYAIMLYDLSESAADKEGFGIGIIGKDAMESLGGTVFYSVRYKDQSLEKDFRKTVYEKYQTIEYLERSANSRISLMYREADNLSAEFSLYCPIIMIVVIAVIAMVLARTVRREGKTIGTLMALGYRKSELIRHYMAYGMIPAVAGDILGVLFCIPFSRMFCGFFFGDAEYIAYEVKIPWGLLAVALLLPLVVYGLVSYLVLCGVLKVEIIPLLKGIHQEKTSRILNGSQAKLGVIYNIRTVCVNRFRSITLVIGIAVATLCIVLGGAFQDAYADLLENKVPYAMLGGQYEYGFNTYQSDGNPYGGDAVFDVSFGAKADDSRFNLIGFDDENQFADLCSEDGEPLSGKKYYMTSAAAARYGIAAGDTFCFYNTVTLEETEVVIDGIVKNDILSLVLTGKENAAAILERPADEYNVIISREKLAIPGELLKKSSSLQDYRDMVEHLSSTAGIVLKLLKVLGVCICILIVVMICGMITEESSRNISMLEILGYRDREVRSFVLSSGHLLVPVGFVIGVPLGYLTAYSMVLASAQSSGMRMSLPVRAETILAAFVFVLVAYILALALSGRKIHRVDMAESLKNVEEMAIEIRDAVKKYGRGESEICALDHVNLRIEKGEVCVILGPSGSGKSTLLNMIGGLDRLDAGTVTVEGVELAKQNRKELTEYRRKNVGVVFQSYNLIAELTVQENIRVVADIAEHPLALAELMEDLGLSRHAKHFPSELSGGQQQRCAIGRALIKNPAILLCDEPTGALDSASAREVLAILEQINRKYHTTVIIITHNEAVAGMADRVIRLHDGKVKSNTENEKVRIEELDIMEKIKETQKGFYGCYWPLEGSTCAIIAMLGDDCEDYMAKMAVKWMQKKYGVSMLTLSPGHKDYSHHNLPVERIGAAITYLKERGIKKIAIAGASTTGMYALIAASYYPEITLTIAMTPADFVMEGFYQGKRDGQTEWPGEGESSVSWQGKPLPYLPYAYRHPEYGRKIKEEAKRGKDMIASLDIFRDSEAAHPIREEEYIKVEQIKGKLLLIGAKDDVLWDTVKYIRRMEARLAAREHTCEVESGIYEHATHFVFPEGMVKTMLPVGGDLITRVFAAGRKYPKECKAARVDIERRITGAINEWMREEKMPTHIFTDEEKENLREQMLEAGFPLLKQYGMTHTSVAKITQAAGIAVGTFYSFWKNKEAYMADLIGYHRRKLMPVLIGEDALTGKKKLGREDARRYLYAVIDEKISIYPHMTLEDEAKLFSGTKAFVPDLEKESAITAGLLSYLEHVRADVNLGLVANLCKVLIITVESRVELHEAVYEETLRVQIETILDLIFEAMRSVPAKRHMKFVKGMDLSTLLELERCGAKYYDNGEERDLLAIMKSYDVDTIRIRLWNDPWSETGESYGAGENDLKTSLEIAKRVTAAGFGVLLNFHYSDFWADPGKQIKPKAWADYGVKELEQAVYDYTLESMQTFLDAGVNITMVQVGNELSNGLLWPEGKVPNYDNIATFVNAGIRAVRKADAAIPVMIHLDNGGNNALYREWFDNFTKRGEDFEIIGLSYYPFWHGSLQMLNDNMNDIAERYGKDLVIAEVSMGYTMEDYKNYEKLSDEERKGYATRPALVEKIEYPMTKQGQYDFMEDFLNRISHIKGGKGKGFFYWEPAWIPVPGSGWATPASLKYMNDPGPCGNEWANQALFDYDGNALPTLSLIRDFKPEVMGEFLFERLSDPEYYEENRVAAHSDHVAYRNWDEADVWLDPLGRKSSFRLFLDGSWKFHYARNYEQTIHGFEKPEYDCRGWDDIRVPAHIQMEGYDSPQYANTQYPWDGREDVWTDEMPTKFNPVASYVKYFTLPETFSGERVFISFQGAESGMALWLNGAYVGYSEDSFTPSEFELTPYLKDGENKLAVQVFKWTIGSWCEDQDFFRFSGIFRSVYLYMIPKTHLCDIKIRPQVAENLSCGTLELDLRSCGSGSVRIQLVERGRLDLAESHYETPEGTEVFALEEKMEGTLHVSREVADVKLWSAEEPYLYELRMEVYDAAGKMQEVVASKIGFRRFEMKDGLMLLNGKRIVFKGVNRHEFSSLTGRVVSMEETLTDVVTMKRNNINSIRTCHYPDNVGLYELCDIYGLYMIAENNMESHGSWDAAAMRKIADPQTIVPGDNPKWEARMLDRVNSCYQRDKNHPAVLIWSCGNESYGGSVIYQMSEKFRELDPDRLVHYEGVYNDRRYNGSSDMESQMYPPVERIVKNLAEQKEKPFICCEYTHAMGNSCGAMHKYTDLTDTEPRYQGGFIWDYIDQSITKKDRYGKEFQAYGGDFLERPTDYNFSGNGICYAKGRAESPKMQEVKFNYQNISVSFTEDGFTVKNKNLFTDTAEYDCILLLEKNGVAAGRRKIALSVAPLSEKTFVLAELEGCMAFADELEHAGKEAGAEYALTVSFVLREELLWAKPGHEIAFGQKIFAAKSPANGGTIGDAAAEYEGKCVTNRKAGLQIIRGKWNLGVKGENFDVLFSYNSCGLVSYRYMGKELIEKIPMPNFWRAPIDNDCGSRMQGRMAQWKIASMYAGMSSKGMFDYEEPVVREEENSVSITYTYLLPTTPQAKCRVTYTVTPDAYVQTELTYDPVEELGDMPEFGILFKLNADYDRLEWYGLGPQETYADRRCGAKLGVYKNRVADNMAQYLVPQECGNKVGVRYAKVTDARGRGMLFTGDELSFSALPYTPHELENAMHAYELPEVHYTVVRVALAQMGIGGDDSWGAPVHPEYHIDVTKPLTLRFGFRGIMGKKKKDTIELRFYEIPQNEYVLALLGENWIRDYGHDEVHLHFHNLMEIGVCRNGTGKLILDEEQRPYQPAMVSIIPNNYPHVTISNTKEGPSYWEYLFFDPAQIIAEMYPKNELFCRELIRKVNRRALFLHEWENHNLAFLVRQIMEEMRGRRSHYTDSVRGLLYSLVIEIIRLNEEQEAKQEVQGVEMQKHSGVTQIAAALDYVRMEYMHMIRVEELAQECHMSETHFRRLFESCMNMSPVDYINLVRIQKACDLLKKTTDSMDIVAQKVGFTTTSTFNRNFKKFLNTSPYQWKINPENYETKLLNYNISARKGWMAQLGKGKLNYRCPSCFLRDLDIDMFYNKETGIYSCIRCQYRGTEEDVLEKNEMIRFRYKAMHQRFDKFDFDMDQFILNLIHRPEMVPEYSATVTGQGKEEDIGDKALLTESLDIFKTQQRLAHENGLKVTIQMTYASLFNDEAVEIAKHDHDVYGDEIALSLLGLPCEEFREKYKTKDFCIWMFSMEDKKAIVNDVFEKFHDRFGFYPESTGSYYMDADLTNYIKATYPTVKCAVATCWEEGPKAYHTCNNSWYTLFDGGPWAPWIPSKQNTHAPAANAAEDSGIVAIPHLSRDLIACYDGNGSNFGTHPQNVLRGMIYDTKTWEYPYLYNLIDQYRSLGKYNNGYAYNMMFVGPGWMNKMGRWEQPYELLYKSYSDGCAYYGKLKKEGKLVDMTMSEFADYYREKKGVDAGNYNEPECALWRDILYGSDKQLFWYCDPYMRACVNMDQGGAIVDLRPYAAKLEWPVGIGTKHVQDASYPFLIQEKYRAGYFTHYAGEGTVRSAKLSYKGEEVDLCLCPTHAHFSQEGKTRILTLDPVTIEFRDLTVKLQTKEYFEEGSSNIKIERTILEMSDPSAEVTLNEYMVACYGTTEYSEDMSHITLKIDGPEEKTIHYEYKCREEGVKGATEVSAVIPEIETRVSMTASNADAEGYVKEGYAFSPMFTLGYRKTISDKEVFATWLNLAKANMLFLHFSDAKLEILRHCSLCLRLKLHGRMPLLHSSNAKLEILPLMMGKRKIVNSVLLHVVLAVLAVIWITPIVWLIVTSFSGYDGMNTSRFFPETWSIRNYTRMLFEPDTVSQFPIWFKNTLVIAIFVCLISTSFVLMVSYAMSCMRFKGRKALMNIAVMLQLFPGFLSMIAIYFILKSVNLTNSHIGMILVYSGASGLGYLVAKGFFDTIPTSLREAAYLEGASEARTFFTIVLPLSRPIIVYTVISSFLVPWTDFVFAKIILNSGISTDWTVAIGLYNMLNRTLIPTYFSRFCAGGVMVGIPIGILFVIMQKFYVEGITGGSVKGMGACMNSKESKKNPVAAFFGAIGKFFKEFGEAAAKGDGAVKASLLVAGAGYWKRKQIIKGFLVTLLEIGLILYTVLIGVPYISQLNTLGTVERAMVYNPATMKNEVNDYDNSLLILLFGVISLSFLIVGILLWMANVRNTYRLQLRAEAGKHINTFKEDCNEMLNDKFHFTLLALPVLGVIIFNIMPLVVMICIAFTNYDKSHMPPNALFTWVGLANFKSLFTTSITSTFGYTFWRILGWTLLWAVLATFTTYFGGIILALLINNKNTKLKKLWRTLFVAAISVPQFVTLLLLRNFFANTGIVNSFCKNIGLVDLLQNLGWIKANYIPFLSDPVWAKITIVVINIWVGVPYLMLIATGVLMNIPEELKESAKIDGANSFQIFRKITMPYMLFITGPYLVTQFTANINNFNVIYLLTQDIYTTTNQKLAASWGKEIDLLVTWLYRLTSEQYNYKMASVIGICVFVVCAVITLFAFNFLIKGDKEDTFRMGIVSGSFSSSEYQQNPKNTQNRYTLRAAKIQGERHFTENDGYGKAWVLAMKKKVLSALLCASMVATMVAGCGGSSSETTDSNAAADNSAADNSAAAGTEEAAAPAASGDTIALRVWAAEEDQTLTNELIEQFKEANPDQTFDITVGVESEANAKDDILVDPTAAADVFAFASDQLIDLVDAGVLQAVQDVDTVSSQNVAGAVEAATVDGTLYAYPMSADNGYFLYYDSNVVTDPTNWDAILTDCAAAGKKAGMVLASGWYNAGFFYGAGFTTVLNDDGSTAMDWNGTSADGIKGTDVVDGMLAIATNPAFLPITDGDTANQIATGELGAIVSGTWDAAAVQEAFGDGYAACALPTYTCAGNQVPMGSAAGYKMIGVNANSAQVGWAMELAKFLTNEQSQETRFAERQIGPSNIAAGESDEVKANVAIAAVTAQNGANGVVQIVGSGYWDPSKAFGEIIAQGNPDGTDVQTLLDNLVESASQPTEMHTGQCGLCRNTVSDTPEMVQGMGKSAKSLNMRLKCWKIMEKEEKKDITIADVAEALGVSKTTVSRAISGKGRIGKETRKRVLEYIEEHDYKPNAIAKGLAQSKTYNICVVMPRDYEVVDWNFFQRCLFGIQEMAETVGYDILLTMCQMNDISSLERIVANHKVDGVILMRTFLEDAQIEFLQQKNIPFVTTGSTNYEGVIQIDHNHRSACRELTSIILMKNLKRIALIGEDEGYMVTHSRLLGFRDAYEQQGETLDENLLYLSPENRVRVDRTVKEILEQNVDCILCMDDAVTSRVLKVLREQHVRVPQDVRVASFYDSTILENHVPSITSLAFDAKELGKVACRTLLDLVEGLEVKQKTLLPYEVVLKESTKMRTDHLLFGAAYYLEYLPYDRLETDMEMMERAGMNTIRIAESTWSTLEPSDGVFDFTCIDRMVQAAAKHHFSVIIGTPTYAIPTWLARKYPDILAVTANGQELYGHRQNMDITHPGYRYHAERIIRAMMEHLKDVPNIIGFQLDNETKSYGTAGPRVQQMFVASLKKKYPDILDFNREFGLDYWSNRVNDWADFPDVRGTINQSLAAEFQRFQRSLVTEFLSWQSDIIREYKRDDQFITQNFDFDWTSHSYGYQPEVDQYDAARCMTVAGADIYHPSQDDLTGAEITVCGNIARSLKKDNYLILETEAQGLTPWLPYPGQLRLQAYSHLANGSNSVMYWHWHSIHNAIESYWKGVLSHDFSENATYREASEIGAEWKRIGTHLMNLKKENRVAILLDNLSLAGLRQFPLETTGDHSYNAVMRWLADALYRRNIEFDMVSSGERDFSAYDFLVVPALYAASDDLLGALDRYVAEGGHLIASFRTGFADEQLKIRHDVQPHLLCRCLGIHYDQFTYPKNVRITTADGRSALAHDWMELVTCDTATSLAHYDHPFWGSYAAVTENAYQKGSALYLGAFFDDELLEPLLVSYLSRHGYEGLSEDTPQFPLIVKRGTNDFGKNLCYYFNYSGEPRTVIHTGNAGTDLLTDTPVAAGAVLTLAPWGLAVVESMFRVELAGSGSLEQNVSISSASRQASDSVSLPRFDNPRDVSDKPQIMIGLFSVPSITPSQTIMTDVLFYQNYTYVADISAIVLCIICWLLLHSSYTVREKSLIIFKAGTVCLMMATVCSISFHTAITRITESRKILIYVLQDGIYLLLILTFVLLCNYFGTLLKLEERPARLLGAVSWGGYAVFAFLEIGSPFTHLGFYIDADLMVHQNFYFDPFRFAYIYYCIVLVVVLFTYRKKFVLKMLRCLAYILLFSFGMIALEAEYVSTSYSCMALLLPYMGVLFLFHYTSYDRETGTLDAGAFDSYLRDVGDDDFSVIFMGFPETNLKKIPELPRTILTFAENYFKTFCLFRLQDDKLALVYQRLSNKAEKNGKYNIQKTFERVCKEHGLGYRVLIAHADDRLREAGEYLALNEFMEEKIPVGAVYECQNKDIIEYRKASYILGELKDINAHCDLEDERVKVYCQPVLNTRTNRFASAEALMRLELPETGMVYPDQFIPMAERHDYIHTLSKIILNKTCRQIKRLEQEGYQIDRVSVNFSILEFRRKEFCKDVMDIIRQNEIPYEKVAIELTESWNETEFDNIKNTITSLQKLGIKFYLDDFGTGYSNFERIIGLPIDVIKFDRSLTILAGKNAESRYMVGSFSDIFKNSHYEILFEGVENEKDEDQCKQMNALYLQGYKYSKPIPIEELTRFLGRAVMFFENIKEAIISILSNKMRSLLTMLGIIIGISSVIIITTIGGSIQSTLTATMNSLGGNTVSGYVEARYPEDDADWDTWIYPDMTQSDYVSQEMIDELVAQYPDEIQGIAAENYLGGGQIKDEADSDNYANVSVDGMTPEQFEYMKLEMQAGRNLTRADNLGKKRVCVVADTMAKNYFGDKDPIGETVSVTMDDGSIYDFVVVGVYKYNAALFGKVDTSVREKDRSTYMMIPIQTSFKLQGADKTGYEYFNLLLTPLADVNQATEDIQNYFDEVYQNNTNFHVTASNMQSSMGMINTVLNVITIAVSGIAAISLIVGGVGVMNIMLVSITERTREIGVRMALGAKRRTIRMQFVIEAIMLCLIGGIIGILIGVGVGALLGQAAKFVIANMYSEYSNYIIMQVHPSATAILLSLFFSMLTGVFFGYYPANKASKMEVIDALRYEMSEPVIRMEKIVKTYYVGKPNELEILHGIDLTVNQGEFVSIVGESGSGKSTLMNIIGVLDRQTSGSYYLEGQDVNGMTDEVRSAVRNRRIGFVFQNFNLLPRANALKNVMVPLIYGEEKTKNAKERAMEMLAMVGMDGRADHRPNELSGGQKQRVAIARAMINDPAIILADEPTGALDSKTGHMVMDLFHRLHEEQGKTIVLITHSQELATETQRIVTLLDGEIVGDNRGGEHMKDKKQKNEQNAGAIAAKPKKKKKVLIVVLVIVAVLVVWIGISIHNATKQVAMAVNTVEVEPVQKRDLSDTISVKGTVAGASSTNVTSKAASEITSMNVQVGDIVKEGDVLCTLDSTSIEEKIADLEKSMSNANAVSSINTQQAADALQQAKDDQTTTLAAAQKTLDRAKDSYNGAQMLYDQGQADFAALLAAKQAVEDAQTAYDTAVETTNRAIETAQEAQELNKYKDTDTTSKDTLSNLKEQLADCEITAPCGGVVTAVNSKVGDINAEKNVIMTIEDTSSLKMVATVQEADVLKLQEGMEATVTADATGDEQIKGTVTRVVRVKSQGTTGSDGSTTSAGGYSIEIALDNQELLIGMAVKAKVMIQAKGEVLAVPYDLIQYDDNGQAYVLVAEADDGGNATAVRRNITVGDEVDYYTEVTGGDLAEGDMLIYDTTFSIAEGQTFTPEQMYSEQDMGLTDGTGTEVSEMIQDILPLHLQNQYEKKQPDDISYMMIYRENKILVREGETLAFLTYRELREICETAGEMAPQSIYLFSVGEETYFLTELPEHLTPEGYCFEKMFAVRSGKPKEHILAAATAWHLYEWYRDNRFCGRCGQKLMHNGTLRMLFCPACGNQVFPKIAPAVIVGVTDGEYILMTTYANREYKRYALIAGFTEIGETAEETVMREVQEEVGLKVKNIHYYKSQPWGFDQNLLLGYFCELDGERDIVLDTGELATAEWVHYSDVPEDPEGLSLTREMMSVFQQKFLSEKMSMSISSDGMFASDSVSLPRLDNPTGHVRHTGDNGRTFWQHMEMQVEIRIKKYGISNQPDVCIFDDPCLSKFGALRGSCPHPGDNLMKKKIGITAAVILGILAVCYIGFAVFFQSHFCFGTTIDGIKVGGCSTVKVEQLIEEEIGGYELTLVEREDQTETITASQIGAAPVFHGEIEELLADQNAFAWPVILFGKSALELEKTVAFDDTKFSGTIEALSCMQEENQRKPVDASCSGYSAADGYTLVPADYGTTIDETALKNAVAEAVEGLEDTLDLEKSGCYVDPAVGDDDKDLLAVIDELNQYVASTVTYDFGDQTEVVDGSTISEWLSVLDGELEVDEEAVLDYVKGLAKTYNTAYKPKTLKTSYGPEVTISNGAYGWKIDTEGEEAQLLEDIKSGKSVEREPVYSQTANSHGENDYGNSYVEINLTSQHLFVYKNGSLVVDSDFVSGNLSKGHGSPTGAFSETYTTTDAVLRGEDYATPVKYWMPFAGDVGMHDASWRKSFGGNIYKTNGSHGCINLPTSVAKTIYNTIEKGWPVLVYTLPGTESAAQLQQDVQTVIDLINSIGEVTADSETVISSARSQYDALPDSTKANVTNYDVLVAAEASLAQIKAAGEQTGMMKPELRQRISGFIDRNKALFLLSYFAIYLPWFGHLEKTVTTHFHVIHTALDDYIPFCEYFIIPYLLWFGYVGWGIGYFYLKDRSEYFRLCAMLFTGMTIFLIVSTIYPNGHYLRPTTFARDNIFVHIVKWLYASDTATNLFPSIHVYNSIAVNIAVWRSDAFKHKHAMRCGSAILMVSIILSTMFLKQHSVFDVVTGMITAAGMYMIVYVNNPFRLPVRQEKYEQKLHRIMSISSDGMFASDSVSLPRLDNPTGHVRHTGDNGRTFWQHMKISTKGRYGIRALIDLAVNSTNGHVSLVNIANRNQISVHYLEHVFSSLKRGGIVKSVKGAQGGYVLADKPENITVAQMILALEGSYSIEPESVNEDALCETVSKVMDTLLWDRVNEETKRILESITLADLVNEFVREYETEQNMYYIMKLRELCSEFKYECLSGSMDVDVRDVIYDSRKITEGTVFVCMVGAVTDGHKYIPDAVKKGASAIVVERADEAQQIPDQITVIQVESARRALAYMSAVLFGHPDRKLVTIGITGTKGKTTTTYMIKSVLEMAGKKVGLIGTIGAMIGDEHIPSKNTTPESYELHRMFAAMVEAGCEYVVMEVSSQGLKLDRTAGILFDYGVFTNLSPDHIGPAEHESFEEYLYCKSLLFRQCRVGIVNADDPHWEEILKGHTCQVRTFSAEGNDVKDQVVDLFASDIGYINEGGRLGMHFTVSGCMDCKVKVHIPGRFSVYNAMVTMLVCNLAGIPDRAVLDGLEKVQVKGRVEILPVSKDYSLIIDYAHNEVSTRSVLTTLLEYHPKRLICVYGGGGNRSKLRRYDMGEVTGELADLCVLTCDNPRDEEIRDINADIKVGLAKSNGKYIEIDDRKEAIAYCMTHAKPGDMIVLLGKGHEDYQEIKGVKYHFDEREAVAEILDEIKSGERTVEAMRFTKMQAFGNDYVYIDAIHQELKNLPELARFVSDRHFAIGSDGMVLICPSEKGDFRMRMFNPDGTEGEMCGNALRSVGKYVYDHRLTDKTDLVIETLGGMQHLTLTVTDGLVSNIRADIGEPRLSTAVIPVVTELPEFVEQPVQVLDRTFHITAVSWGNPHCAMYVDSVADLDVEGYGKTIEHMTSIFPNKTNVTFVEFVRKDYIKIREWERGTGETIGCGTGCATAVVAGVLTGRTDRKVTVEQIGGPLFIEWDEKTNHLFMTGPSHTVFESEIDASHIIGMSKQMEENNMKNFSNYTDFDTKENLHFESKAVHGALGTEPLTGAVSMPIFQAATFRHPELGESTGFAYSRLENPTRQELERTMAILEGGIKGFAFSSGQAANMAVFSLLNPGEHVILSDDIYGGTFRIIGDVFGKYGIEHTYVDMSDLDEVKAAIRPNTKMFFIETPTNPMMKVADIHAVSEIAKSVNALTVVDNTFLTPYFQKPLTLGADIVTHSSTKYLGGHNDTISGIVVIKDNEEIADQIHIHMKSHGSQLAPLDSWLVLRGIKTLAVRMDRHNENAMKVAEWLRTQPKVKKVYYVGFADHKDYEVTRKQTTGFGGMISFTVDSFETVKKILKGVDMIMFAESLGGTETLITYPTTQTHEDTPADIKEKLGITDCFLRMSVGIENVEDIIADLDRAMNGMPEYKKVGYLTTSFKMFHLKDTSRREFHYHYHDFHKILILLGGDVTYCIEGRTYQLAPGDIVLVNAGEVHKPEIHSDLPYERIILYVSPDFLTEYAGEDCDLSFCFKQAYREQAHILRLQDSKGGRLGASIRALDASLNDDDYAAALRHRLLFLEFMIQLNRAALHHHIEFVGDSASNEKILSILTYLNAHLTEDLSIDDLASRFYLSRSYLMHTFKEQTGYTIGGYLLTKRLFLAKELIAAGTPITEVCYSCGFQNYSTFSRAYKKSFGESPRDYRQSLMSTESKKVWVVGHKNPDTDSICAAISYAYLKNQSGDKKTYVAKRAGAVNEETRYVLERFGVEEPPLVTYAGAQIKDINIRKTAGVSNQISLKRAWELMKKLEVVTLPVTNQFGKLEGVIVTKDIATSYMDVLDNCVLSKARTQYKTIAETIDGEVYAGNEHAHFVRGKVVIATSNPEYMADYIEDDDLVILGDREEAQMQAIRSNASCIIIGGGLEVAEEVKKLAEKRDCVIITTPFDTFSVARLINQSMPIKQYMTRRELVTFDIDDYVDDVKDVMSRVRHRDFPVLGSNGNYVGMISRRNLMNMQKKQIILVDHNEKSQAVDGIGEAEILEIIDHHRLGSLETVSPVYFRNQPLGCTSTIIYQMYQEQRVEIPKEIAGLLLSAIISDTLMFRSPTCTPLDKSVAKRLAEIADVDIEDHAKKMFRAGSDFKNKTTEEIFYQDFKIFHTEDCDFGVAQISAMSGEELEQIGEQLRPFLPQVLGEKRLNMVYVMLTDILEESSKIIFAGEDAGKILAHAFKKQEDADGILLDGIISRKKQMIPTLMNEMSERVMANLFQLLLAQIHPRQGRPAGEPERAEGYKTHPKRESNNKVRETRVLETGESTQERERIQTEVEKEDFLLSQIDEFREKAKQLQDLLAAKENKVQELQSIVNEREGKAEEWQHILVERQEEADKIVTEFTKKVDDLADRVTAKMTEIETSISGQVAEVKRASEEQLASNRKLNEDQIAANKKLSEEQLATNKQFLEEQAIANKKLSEGQIAEVKALLENATAQLESIKTDLSEKVHSENVKCYRNIQDLFNEFDSKIEKMDEMEQGVGSVKGYVKCLSWFAILNFVVLIGFILYSLGVFNFMTKDMTEGAIPPLLVGFTIPLVLGNLFQLFYNAVDSMIVGKFVGETALAAVGTSSPLMTLAILFISGMCMGAGVLMGMHYGAKDYDVLERQISSTMIGGLVFSVLLSAVCIFLTPWLLRLIRTQEEVLPIATGYLRIIFCGLIFTFIYNFYASTLRALGDSRSPLYFLMISAALNVAGDLFFVVVLGWGSNGCAFSTVLSEALCCLLCGLYIKKKVKILCLGRKWRVFDRRLFYKTVQFGWVSAMQQATVQLGKIGIQAIVNTMGISVMAAFAVVNRIDDFAYTPEQNIAHAMTALLAQNKGAGKKERIREGFRCGLWIEMIYALFICVVCFVFARPLMKLFVTDEEVISLGVIYLHAIAVMYFLPAATNGIQGYFRGMGDLKVTLSSSFINMGVRVAAAVPLVFSMKLGIVALPVAYLIGWLAMLAAETPLLFRRKEMKKNEMTWQVMLIEAVGIVSAIAYLGLQIYYGIAFHVNPVNLMMNLVFMILVYVGLTLLAVYPERVNGLTREVCSGKIRQYTLRMVRMVKLVFVEGLLFTSVCDALGKELKQGYSLIIVVLIAAIAVYYEGRIIHILKQNNKRMRSALMPFWCKRMEYTHVTHTFGPVYDDASRILILGSFPSVKSREQQFYYGHPQNRFWKVLAAVFEDTLPETIPQKKAFLLEHHIALWDVIASCDIAGSSDSSIRNVTANDMEVILKTADIRRICANGDTAYRLFSKYCLTAEMPEVKKLPSTSPANAAWNLERLTQCWAQELLLMKRLMSAALVAALGVTCLGGCQAGSTGGDTAVNGKGVKIYVSLSQADAFRNTLIDAAKKTAEASGAEIVVYDAENSIENQVAQIKQAVAEDYDAIMCGPVDADTALELEALAGDIPIVFYNSCPDASVLEPDKYIYVGSDEGVAGQYQAEYILDQMSDKDEINVALLKGPKNHSATKGRSEEFKNTLKASGKKINVVFEDNADWEQGIAEDYFDLFLQTGKQFDAVVCNNDTMALGVIDSCKKNGISGVPVLGIDATADGCAAIQAGDMAFTVYQSGSGQGEAAVKAAIALGSGGTTQGMEGLSDDGLYVWVPFEKVDSSNVADYQMQKEKGIVSIKVKLLGVIVPVVIVSILVLVLIAYRTSAGLIESYSENLLESSVENQASQIESWLEQNIGAFQIVKTTIENTKPDDKELQTMLDSYYNYNSNYPEGLYIADETGKLWKASDSAMSESDPVNSVWYQEGLTRVNMAIGSSYVNSEGVSVISASGILNDGSGKMKVISADMTLDRISVIVNAFIEMKNAEAILVDKDTATILASRDSAKISTTLGSDGSSAFEQSVAAKIADRDYSFSTLDGNMTVFEEVSGTNWILVSYIPTSTVLADLANLRNLMILISVISILILCVVIERTTHVVIAPVRKLTNVIKALTDGDFTVSVKSSGNDEIALMSRSVERFIASMKQMIASMGDISGKLGTQADASDSVSREMQSAANVQSQSMSELNMTVDQLSVSVNEIADNATKLAGVVADTKDDSVNVGNKMRETVEVSQKGREDMEHVGEALENIRTSIQNLEAAVNKVGTASGEIVEIVQLIGNIAEETNLLSLNASIEAARAGEAGRGFAVVASEIGTLASNSTASVEHISKLIHEVNELVADAVRQAGDSADNINESSGLIHTAIDTFDKIYDNIQQTSALIDQMVDKINQVDEVATNVAAISEEQAASSDEILATSESMLTQAKGIAENSENVAKESRSLTESSIQLADQVKLFRIMDNLIIPKDYHSELNLHDTQIAIKTVKDFFQGLLALRLNLSRVSAPLFVDPLSGLNDNLNGVERPVTFDIKEQNGRTAEVVQSLAKWKRYALKKYGFSYGEGLYTDMNAIRRDEITDNIHSIFVDQWDWEKVIKQEERTLDTLKETVNTVYKCLRKTEKYMAIQYDYIEEILPHDIFFVTTEELAEMFPDNTPKEREYYITKTKGAVCILKIGDTLENGEPHDGRAPDYDDWALNADILVYYPVLDIALELSSMGIRVDKKALLSQLKKAGCEDRAKLPFQKAIIDGELPYTIGGGIGQSRICMFFLRKAHIGEVQSSLWPDEMMQACEKSGIQLLMFASDSVSLPRLDNPAGACPTHRRQWADFLVSLMAPLHRQYKTARTELVGICYMREAGLGIDIGNGSISIAVVEGENIIYKDYRLHRGELYQNLVDMLGQVETSCGDRILYAAVNPGAVCLYPGIQKEVQINRISSLLEGQRMLYPDAGSIVEMGAQNSCFLTGIREGETLSYAMNGECAAGTGAFFEDQMYRLGLPLSAYSEYVRRAKSVPRLAGRCSVFAKTDLIHRQQEGVPVEDILLGLSYAVIRNFKSAVVRKLPVQPPVFVTGGVVYNEGVRLAICDIFGLKEEKLLCGEEGAVVSAAGIAACACRGKLAFDWKHPIRRKGADEEQKRKALPRYDYEKEALHRTRPLRGGEKLWLGIDVGSTSTNLVLTGEDGAVIDDLYLRTRGNPLGAVQQGMAQLKRKYGEALTWEGIGVTGSGRYYIAEKTGAGTVLDEITAQARAAAHLCPEVDTVFEIGGQDSKYISIRDGQVVDFEMNKVCAAGTGSFVEEQANRMEVSLEEIGNSALKANVPIDLGERCTVLMESKIAAELAAGTDKEDICAGLCRSIVRNYLNRVVGNKRKGEHICLQGGVVHNEGIVAAFYEVFGERLHITPFYDVTGAYGAALAAKEQGGTSQKESIRNEENYRKSQKWFLAGYDGTLLPGKKTVGIPRALMIYKFFPMTYQYFNTLGFNVLLSPETDDKIIALGQEMAAEETCYPVKLLHGHMEWLARKKVDYIFIPCIHTIRHETSGVAHNYGCVYMQTAPRIVASVLGLSERGVELICPVLDLDMGKPQLAGAMIKAGQELGCDKARCAAALAKGAAAMVRCEKNSEKLGAQILDELKPEDKVLVLITRNYGVSDPVLNMGIPGEMLKRGCRVLTLSHLKGHDVDLSGHYPNLYWPFAQHILSGAKIIKEHPNLYAVYLTNHGCGPDGMISHLFAEIMGDKPYLKIEVDEHQSKVGVITRIEAFLNSLSHVENCTERAILPEAAVLSGRLRDGKKDTKDTKDMKEPQQETVYLPPLSVYTEWMALYLNQKGKRTAVLPDYTAQDLHAGKAYSTAKEYCTFSAAAGQIANRLQETDGEEKQFLVFQTEGAEADGMVPEILRAVLDADGKRAHLVTPFLEQLLFAEEADILWQVLLLGDAWHCLDEEWREKVRASFREKTAAPDAWSREWTKSLLQEWAVYVTEDRQLLLAGDPIVLHSAYLNQNMEEAVRKHAFVPVYMPLSEYLWFLAAESGRKIPEHFTEQLHEFMQIYRGVYGSWKQPDERLQEIREKFPLVHGANLRYLCSLMEQELSRGKGMILVSPEYANYASVMEMLRTGSKYPLLHARADGNEEAEEVERREIFLGLLEMESMDDYKEELEASFRRIREGDILTGTVIDVNEEGVTLDLKYYAPGFISAEEMSSDPDFSLAEAVHVGDTIEATVIRVDDGAGNILLSRREANEEQAWEKLKEMMEEGTTVTVRIKESVKAGVVAYLEGIRAFIPASQITSAYVEDTESWVGKEIPVRVITVDEEREKLVLSGKAVALEAEAEERNHKISMIVPGTVLEGTVESLMPYGAFIDLGNGLSGLVHISQICERRIGKPSEVLKVGEKVKAKVLNTNDNKISLSMKALAEEMVDTEGVEDLEAYTDHTSTGTSLGSLLAGLKLDMLDIKLKNNNRNNGAGNNNVSANNDASSNSGASRNNGAGNSSNNSNAVNSSKRIIIAIAGIIFITIITMCFFPVVYRTAERQKEQQKAEMMRESSDSVDNDTVQTLYQGSYVLYVEQMERSGQADAGGLFLNLPTDDEDYQYVKDTVTSTFDEWKSQFESDSWNIDYCVYKSSADCVKNTDQPLETCVDGTVTEKIKQYYTDIVCLSFDKEGALEVTPLYDENISGSVLIKAFQNVDRENLLGQSLGGYVEAGQLQGPKDFKVIFGLPVSKSDTISLGDPYEGMTNYWVQVVLVYRASGGSILFLVSLAAVAGWMFLMTSRRIWNEDIPMQRPGKWYLMEVAVIAVCCMACMEENFYDIIRSYSYYSEGVDVLLGNNAWRAILQLGQMMVPLLFLYGIWYAALRVLRPVFFLGVREYIRQYSLIYQIFPWLKKLWNTFRYEVAHVDFSEKSTKTIWKIVLINFAVLSLCSMMWFFGIGALIVYSIFVFCFIKKYYDRIGRDYQALLRSVSRMADGDLDTEITEDLGIYEPMKVELSRVRDGFKKAVDEEVKSQRMKTDLITNVSHDLKTPLTAITTYVELLKKEDITEEERRSYIETLDKKSQRLKILIEDLFEVSKATSNNIVLHPMEVDVVNLLKQVAVEHTERFAAMGLTLRWDVPEEKVIVVLDNQKTFRIFENLFVNIQKYAMPQSRVYVQVHTSGEAPEEFVEITIKNMSATELNFDPEEITERFVRGDTSRGTEGSGLGLAIARSFTEAQGGKLSIEVDGDLFKVVIRLKCGTLQVEKEMEVMEQYNILIVEDDKEIRDGIEIFLKSQNYNVFKAADGVEGLEVMEREKISLAIVDIMMPRMDGVTMTMKLREKYDFPVIMLSAKSEETDKVIGLNIGADDYVTKPFTPLELMARVNSQLRRYTQFANRSPKEEKNDRIHVIGGLELNEDTVEVFVDGKPVKMTPIEFKILALLIRTPGRVYSTDEIYERVWNEKAINTDTIMVHVRNIRDKIEINPRDPKYLKVVWGVGYKIEKQQMLSRGQGKSRKTFSRPAGLNDTFLLLDPIFASMRVWFALFLFSDPDCSFLLALCQPFSILSGSGTHFFYSGTQFLLLYGSGSHFFSSQTRGALPFWHYVNLFPFSTGLARDFSPLELRLFLLSARDSNLLDDSSHIFQHCFIPFSHLSGILIIVKRKSPLTQFLFHNMAGKYPTSYRLLLLFIKMGKIYLVDSENVGDIWVPLLVSSQEDDEVLVFYTTKSPHMNYENVRMLKETEKEADFIKCFEGSNALDFQLVSELGYRLSQNADREYVIVSNDTGFDAAVRYWSTRKMPVSRLSGKECHRMLTEKKQRVAKESGAAAEPEQEQTRAAGPEVEAEQVRETGQEAEAERIRETGPEAEAEQVREIGPEAEAERGREQSKKPRSSKKSEPSKAGGKAGESGKPEASGKAGNAETSGKAEVIGKAEDAEKFGKAEPAEKAGLAGESGKPEVTGKAEDAETSGKSEPEENAGLAEESGKAEPAEKTGRAKRSRKSAKAVKAEKSEHMSEPDRSEKSQKSDKAKTQNAGNEKPDLTEEQSGQMTAMMDLKEEMSENPQSVSNATGQSEAPAKFGLDLNAERAILKTLCACISKENLVDFHNALVALLGEEEGKRLYQELKTNAEYASYWSELPAYGLKEKFDMYCKMVFDHSEYAKEPPEDFSGFLYQANGKRKNLNSLRAALQGHYGKDKGMKYYSLFKSHIKMMNRMMEQFATQMEAARKGIVTEELKKVAAKERMTTEELMPLVAEGKVVICANRHHKCIDPEGVGSMLRTKINVNLGISRDCKDYDVEMEKVMAAVDMGAHAIMDLSSHGNTIPFRRKLTAECPAMIGTVPVYDSVIHYQRDLATLTAKDFIDVVRLHAEDGVDFVTLHCGITRKTIEQIRKHKRKMNIVSRGGSLVFAWMCMTGEENPFYEYYDEILEICREHDVTISLGDACRPGCLADASDVCQIEELVRLGELTKRAWARDVQVMVEGPGHMPMDQIAANMKIQQTICMGAPFYVLGPLVTDIAPGYDHITSAIGGAIAAQNGAAFLCYVTPAEHLALPNVEDVKQGIIASKIAAHAADIAKGVRCAREIDDKMADARRVLDWDAQWECAIDPETAKQIREDRKPEHEDTCSMCGKFCAVRSMNKALAGEYIDILMLLSISLSSELLFSITKKEQPSLAALLGEGIFTMGYSKNYIMLRKIQPGAERLGGIAEQRGKTEEDVDEYQKLADEELIQKLREGDERIMDYILEKYKPLVLRKANAMFLIGGDTDDLIQEGMIGLFKAIRDYRSDREASFFHFAELCINRQLYSAVEASNRKKHVPLNTYVSFYSQTTEEGKSLAETLLTDQMDDPEQLVIEQENFTAFWEQLREQLSALERQVLDAYLEGKNYRQIAEELGKSPKTIDNALSRIKGKIRQRMGYEELKIEGRNAVLEAFRSGKTIDKLFVLDGCQDGPVRTIVREAKKHDTIIHFVEKERLDQLSETKKHQGVIAVAAAYEYAEVDDILEIAREKGEPPFLFLLDNIEDPHNLGAIIRTANLCGAHGVIIPKRRAVGLTATVAKTSAGALNYTPVAKVTNLTATIKELKEQGIWFVCADMGGTQMYDLDLKGPIGLVIGSEGEGVSKLVRENCDYVASIPMKGDIDSLNASVAAGVLAYEIVRQRMMMGRGIDSYIKEQFGIAEVDIRTYSPLTLAYIGDGIYDLVIRSVVVGKGNTRAGELHKRTSQIVKAHTQAEMMEVLLPLLTEEEADIYRRGRNAKSPTMAKNATMSDYRKATGFEALMGWLYLQDEFERLVELVKTGVDGLHLKLMENKFKFYNTLTRNIDTVIPHEDGKIAMYTCGPTVYHYAHIGNLRSYIMEDVLEKALRYVGYDVKRVMNITDVGHLSSDADTGEDKMLKGAKREHKTVMEIAKFYTDAFFDDCKKLNIKRPDVVEPATNCIPEFIHMIEVLLEKGYAYVAGGNVYFDTSRLDDYYIFSSQSEKELLVGVRDDVEEDVNKRNKNDFVLWFTKSKFEDQALKWDSPWGVGYPGWHIECSCISIKHLGEYMDIHCGGVDNIFPHHTNEIAQSESYLGHKWCGYWFHVNHLNDKSGKMSKSKGDFLTVSLLQEKGYDPIVYRMFCLQSHYRKPLEFSYEVLDNMSVAYKKLVKRIADLKADGTVDEGKFAEYKEKFCDAISNDLNTSMAITIVYDLLKDDTLNDATKRALAEDFDRVLSLNLTTAKVENPAEDTEVDAELEAYILEKIEERKAAKKEKDFAKADAIRDDLLAKGIVLKDTREGVIWHKAMGILRYMKEEFQVIKERDPAIKSPMEVLLYPTFHVMLSYRRAHKLYLKGHYFWARFISQRAARKTGIEIHPGATIGKGFFIDHGSGVIIGETSIIGDNVTLYQGVTLGGTGKETGKRHPTIGNNVMISAGAKIIGSFTVGDNSKIGAGSVVIEEVPPNCTVVGVPGRVVKRDNIRTPQDDMDQVHLPDPVKEDITVLQHENAELVNRVLDLEKEVRILSAGAGASQEMRVGMGYDVHKLVEGRDLIIGGVRIPHTLGLLGHSDADVLLHAIMDALLGAAGLGDIGKHFPDTDPQYKGISSMKLLSHVAELIRERGYVVENIDATIIAQKPKMRPHIPQMEENIAGALGISTDQVNVKATTEEGLGFTGTEEGISSQAICALSSFYEGSFTVADSAAGCAGCGGCGRSVQMNFAIENGIIDIDTIQKKIEMNKRKKFIEKHNYSIWEGKDGKFYTYLPDEESQRGKKLVKRTSEKAIEDEIVKFYKAMEDEPTISQVYSSWISEKLEYGEITRQTKDKYETNFKRFFENEYLPIANRKIRYIDEEILESFIKTAISKLELTQKAYSDMRILINGIFKYAKKKHYTSLSITNFMGDLEISEKSFKRNHKSDNELVFSKDEELLIEQFIMEDQPTLIELGIILAFKTGLRVGEISTLSWSDIAENKIHISKTEIRYRDDSGKYVFDVQNFPKSDAGFRDVIITEDTNELMRKIKMLNPFGEYIFMKNGKRIKGQAFTRRLYVICDKVKIGERSIHKARKTYATKLIDGNVPESVIKTQMGHTDIRTTLDHYYFNNKTESEMQEYIAKALSMMKFSKLTKPELEEIIENANFTEQEEEIFSLLARGFIPKEISMKICIPLRTVERRIFDIKQKVKRLEGDLNGKSFMKKKIIAAIVTATLLIAGCSDMANVSAGQENTMVLVEGWRDYSIYADKDTGVMYLVYQRNGNGCTVMLNADGTPKIWQGKEMKYTVETTENGVNETLELNGTIYKKEWARRENGLLECSQKDFRAQMEEDGYSGELAAKVDEIFDGFLADAVDDMRDYLDMNQTAEDKIKGCCQCIHGEIEHWKDINQNGCSDPFWPDGCNMNLTRNHIIYYQRQLREICTENRLPLPDEYYFAVPPEVDVNYMASLKQKPRVERLRQTGRITTGRFYQYDENQMSLFLAEAGVKREEVLWLNYADTQMSFEADFPEVMPMDRADDPDLAEKMKAEAEGIFLWAFEGLQRLVANNFKFTESDRIRENREAVKRDNNNIFDFMESEGYIRRKADASISSKDFYEIMWNAAEAVEKQWNSQLARRWVLTIPREIPPDQYAVLVREFCQKQFVSKGMIADFAIHDPHPPRHNPHAHVLLTMRAMDEHGKWLPKSRKVYDLDENGERIKLPSGRWKSHKEDTVDWNDQKYCEIWRHEWEVIQNRYLEANDRPERVDLRSYARQGFDIVPTVHEGAAVRQMEKRGIQTNIGNLNREIRAANRLMKSIRQLIHNLKGWIAELGEKRKELLAQKAAEEATLLPNLLMKYMEIRKEERKDWTRAGQNRGTSQDLKAVSEALSYLMNYSAIKYCDIANGTGVRTVLFVSGCRNHCKDCFQPETWAFEYGNPFTGEVEDEIIASLKPDYIRGLTLLGGDPFEPENQKALLPFMRRVKAECPGKDVWAYTGYVLDRDLVPGGKCCTADTAELLHMIDVLVDGPFVTELHDISLLFKGSSNQRVIDCAEYCRSGEIRELMMKIIKRSGSEDIFDISKIEAAIRKANDSVIDYEKLGDDKIQAILSNVEKACENMKRSPSVEEIQDMVENQIMSQKAFNVARNYITYRYKRELVRKSNSTDEQILSLLECNNEEVKQENSNKNPTVNSVQRDYMAGEVSKDITRRFLLPPEIVEAHEKGIIHFHDADYFAQHMHNCCLVNLEDMLQNGTVISETMIDTPKSFSTACNIATQAIAQIASSQYGGQSISLSHLAPFVQVSREKFRKQVRKELETAGIEATEEKVNQMAEMRVKEEINRGVQMIQYQVITLMTTNGQAPFITVFMYLDEVPEGQLRDDLAAVIEEMLHQRILGVKNEQGVYITPAFPKLIYVLEEDNIREGSKYWYLTRLAAECTAKRMVPDYISEKMMKKLKDGDCYTCMGCRSFLTVDRTTGNLAHAKNYKEGKHKYYGRFNQGVVTLNLVDAACSSGGDEKKFWEIMDERLEMCYQALMIRHNRLKGTPSDVAPILWQNGALARLKKGETIDELLYHGYSTISLGYAGLCECTRYMKGVSHTEPEGTEFALAVMRRLNDACAKWKKETDIDFSLYGTPLESTTYKFAKCLQKRFGIIPGVTDKNYITNSYHVHVTEQINAFDKLKFESQFQELSPGGAISYVEVPNMQNNLEAVLSVMQYIYENIMYAELNTKSDYCMECGYAGEIKIVTDRDGKLVWECPNCGNRDQNKMSVARRTCGYIGTQFWNQGRTQEIKERVLHLMERIKRSETIGYKIRLLHNQLHKNMEAKREENEDNLTGMQRWTLGFLKDHADREVYQRDIEEAFSVSRATASNMLAVMERKGLIERAQVSHDARLKRLVLTDKAAALLDGAERDIREMEARLTAGLSEEDVEHLKRCLDQMLQNLDVTIAEDTRCCCKPKQMLKTLGAQIREFKKDSLLTPVFMILEVFMETIIPLMMASIIDQGVEAGNIHHIYVMGAWMVVAACFSLFCGVMGGKYGARASAGFARNLRKAMYENIQSFSFSNIDKFSTAGLVTRLTTDVTNLQNAYQMLLRMCVRAPISLICAMCMAFFISPRLASIYLVAVIILGIILAIITVRAHHYFMEVFPKYDDLNASVQENVSAIRVVKAYVREDYEKNKFRKASQNIYNMFIKAESILAFNNPVMQITVYSCILAISWVGAKMIVGGTLTTGELMSLLTYCMNIMMSLMMLSMVFVMLAMSVASAERICEVLNEKSDITNPENADKTVPDGSITFDHVTFRYSKTSAKPVLSDIDLSIKSGETIGIIGGTGSSKSSLVNLISRLYDVSEGRVLVGGKDVRSYDLDTLRNEVSVVLQNNVLFSGTIYENLRWGDAHATDEECRHACRLACADEFIERFPDGYNTYIEQGGTNVSGGQKQRLCIARALLKKPKILILDDSTSAVDTATDAKIRRAFLTEIPNTTKLIIAQRISSVQDADRIIVLDNGELNGFGTHEELLQTNAIYRDVYESQTGGGGDFDEGGAAMPQNEKNAKPIGGPGGRGGHGPRPNVKNPGKLFMRLLSYIMKNYAVHCVIVVICIFITVLASVQGTWFMQTLIDGYILPLMKQSDPDFSGLAHAILRVAVFYGIGAIAAYIYTRIMVNVSQGTLKHLRDDMFTHMEELPIRYFDTHSHGDIMSTYTNDIDTLRQMISQSMPQFLNSIISIVSVFISMLLLNIPLTLVTLVMVGVTLFATKKIGALSARYFIAQQKDIATVNGYIEEMMNGQKVVKVFTHEEESIADFNRLNDQLFHSADNANKFGNILMPVNAQIGNISYVLCAIVGGILALGGYGGFTLGKLASFLTYNKSFGQPINQLSMQLNNIVMALAGSERIFALLDEQPEVDDGYVTLVRAKWENGQIVESKERTGMWAWKHTHQADGSVDYIELKGDVVFDDVDFGYVPEKTVLHNVDLYATPGQKIAFVGSTGAGKTTITNLINRFYDIQDGKIRYDGININKIKKDDLRHSLGIVLQDTHLFTATVMENIRYGKLDATDEEVMAAARLANADTFIQQLPNGYDTLLTGDGANLSQGQRQLLAIARAAIADPPVLILDEATSSIDTRTEKIVQDGMDKLMAGRTTFVIAHRLSTVRNSDCIIVLEQGRVIERGSHDQLIEKHGKYYQLYTGNLAEGMRTQSVECSKLGKTRIITDASCGMVRNTGFCGQNLPPHVYLELLSIYFSMDRKKKRIHLSKENEKVFREILTEVCKNSRFLSSSRFMQHGSTSVFRHSVAVAYVSFYIAEKYRIRVNCHALIRGALLHDYFLYDWHEKDDSHKWHGFYHAGKALQNAMEDFELSEIEKETIRRHMFPLNPIPPCCREAWIVTLADKICSGGETVEGFREKFEEIRNPLMMQLSREKKHFLHRKYRVALACLTAVSLIGGCGYHKSYHLERKYGDVLKSFLPDGYEITRTEKEDKVNGKHYYTSNNHPTLDGYVYDTYDYYSIDYGYNNSHSWYISTYLVANGTYEDDDWMASQVWGQITYEIERLMRRTTTQYKYVDENGDTQNFGAVTTLSGTEIYCDMDDLEILNNPTGINLAEFTWDDVRSLGNPEIKIYAKSSTNKDALQEDVIQGVQEAIQEDAGDGIVITIEVDRMSRAKQSMDGNTAAAHVAYAFTDVAAIYPITPSSPMADTVDQWSAAGQENIFGNQVKVVEMESEAGAAGAVHGSLAAGALTTTFTASQGLLLMIPNMYKIAGEQLPCVFDVSARTVATQSLNIFGDHSDVYACRQTGFAMLCETNPQEVMDLSPVAHLATIEGKVPFINFFDGFRTSHEIQKIEKWDYADLKEMCNMDAVAEFRAHALNPEHPAMRGSHENGDVFFQHREACNTAYNELPAIVEKYMKKVNEKLGTNYDLFNYYGAPDAERVIVAMGSINDVAEEVIDYLTAKGEKVGLVKVRLYRPWVSEAFLKALPKTAKKVAVLDRTKEPGALGDPLYLDVATTLREAGLDTVVLTGGRYGLGSKDTPPSSVFAVYKELEKDAPKARFTIGIVDDVTNLSLPEVKPAPITSAEGTVECKFWGLGGDGTVGANKNSTKIIGDHTDKYIQAYFQYDSKKTGGVTISHLRFGDKPIRSPYYINQADFVACHNPSYVTKGFKMVQDVKPGGVFMINCQWSDEELAHHLNADAKKYIAENNIQLYTINAIDKAIEIGMGKRTNTILQSAFFKLANVMPIDQAVEFMKAAAKKSYGKKGDAVVEMNYKAIDAGVDAVHKVEVPASWKNPEADAAPAELKGLPKTVKMVRDLMEPISLMDGDSLPVSAFKENPDGQFELGAAAYEKRGTAVTVPTWNAEKCIQCNQCAFVCSHATIRPFMLSEDEVKAAPSNIKLADTKPKASEYKYTMSVSPLDCMGCGECITVCPVGAIEMVPQESQAEEQPVFDYLVANVGKKPGMPADNTVKGSQFNQPLLEFSGSCAGCAETSYARLITQLFGEHMYISNATGCSSIWGGPAATSPYTVNKDSKKGPAWANSLFEDNAEHGLGMEIGQKVLREQAIASAEKCATSDKASAELKAAFDKFVETKNDTKANTPAAAALVAELEKAAAAGCPDAKAAVEKKDYLAKKSVWIFGGDGWAYDIGFGGLDHVLASGENVNVMVFDTEMYSNTGGQASKASNIGEVCQFAASGKEVGKKSLAEIAMSYGYVYVAQIALGANMAQAVKVIAEAEAYNGPSLIIGYAPCELHGVKGGMNHCQDEMKKAVAAGYWNLFSFNPQLKAEGKNPFTLTSKPGDGSYQDFLNNETRYSRLTRAFPERAERLFKASEEAAKARYEHLQRLVELYKMTEEIASQEIDFMEYGDTQINTIDMERGQRKDLIGKMPVGIAVVRGGNELYIEMVNREFLHAEGYDREELTGNTPFVEYLYRDDTGVFEDAIEVCRELRTTEEIELRIRTKSGGVCWELMRCRLYYYRDAVPYYILASWNIDKRKNLEEELRLMEEQYSMLEEVTDEFPLEYDVAQRRFRVPRKYRGNGQPGTAGRRYMDYEEMLADICEEDRAAYARVLEAASRDVRTGSIDYRMNVAAAGEEPVYVWYRTIYRSIVGDNGQIIRIIGRSYDVSSDRRIQEELSEEAKRDPLTRLYNKVAASGEVERILKSEPEKQHVLFLIDIDNFKRINDTFGHTVGDTVITDIAGVLQSQFQETDVTARVGGDEFLALMRDVAPKEAEACAAALGREARKKLIGDDAIVEVTLSIGMAVYGEDGRDYETLFAMADRAMYATKREGKDHYSFAGKKQQEGAERERRRDRIEYAPESGQKVDKEFLNFAFSLLSHAKDINGSLNVLIEQIGKKYGLGFAMVFEYREEQQEMVLMNYWNRDGSRVEQQVFPQSVTVFREAEIGRFVSTPTEDILTEVPQLGAEKYHGTSIKNCGNVKFEFSGNRSGCLCVGSSSAEGFSKEEAGMLSELARVVAVFVSLRSRQSDDQAEIRHLQNQDMLTELYNLDTFRRLIRKKLKSGGLAQDENMVYALVNLDVNNFAYVNENYGQEAGDSILQELAALIRSESHVVEACRMYSDYFIELVRGTDKKNILGLVEREDQMFGEQLKIRYPAGAMQLSAGICFIDDGEETFEKILEGANLARKLAKEQNVGAVVYRDDMRKKRDEGIRITGRFYAALQRGEFEVYLQPKFLLREERVYGAEALARWRLESGEILSPARFIPALENIGYIVDLDFYILEQLLRAMRRWRDSGRELFTISTNFSRRNFENGGDDFIERLQNTLQRYGIDPCYIEIEVTESVIVEKLDSLKACLTRLGKLGYRIAIDDFGTGYSSLSVLLEIPANVVKIDKSFTDKIHQNGQSAFVYQMGQFIQSAKEEVIFEGIEEEQQRTFLMECGFNYGQGYYFDRPLPLEEFEKKYIMISTSNITLRIGKKALFEDVNIKFTEGCCYGLIGANGAGKSTFLKILSGQLEPTSGEVIITPGQRLSFLQQDHFKYDEYTVLDTVIMGNKRLYDIMKEKDAIYMKEDFTDEDGIRASELEAEFADMDGWNAESDAATMLNGLGIPTEDHYTLMADMPSALKVKVLLAQALFGNPDILLLDEPTNHLDLDAISWLEEFLINFENTVIVVSHDRYFLNKVCTNIADIDYGKIQLYAGNYDFWYESSQLLVKQMKEANKKKEEKIKELQEFISRFSANASKSKQATSRKRALEKIQLDEIRPSSRKYPYIDFRPNREIGNEVLTVEGITKTIDGVKVLDNVSFIVGHDDKIAFVGSNELAKTTLFKILAGEMEPDSGTYKWGVTTSQSYFPKDNTEIFDTDLLIVDWLTQFSEIKDATYVRGFLGRMLFAGDDGTKKMRVLSGGEKVRVLLSRMMIMGSNVLILDEPTDHLDMESITALNNGLIKFPGVILFASRDHQVVQTTANRIIEFLPDGTFVDKVSTYDEYLENDEMARKRQVYSMSSDDEGDNMRIGGIEAGGTKMVCAIGEVQTDKGQPGENQVTITERVTIPTEKPKITLPRMAAFFEGKGISSLGIGCFGPVDLHRASPTYGYITSTPKLEWQNVDMVGTFTRALGVPVGFDTDVNAAVLGEVTWGAAKDCDTAIYITVGTGVGVGVYCNGALMHGLVHPEAGHLLLQRHPKDTYAGKCPYHANCLEGLASGPAVEARWGRPAKELADREDVWEMEAFYLAEAVANYVLTYSPQKIVLWGGIMHQSQLFSMVRTKVQELLGGYISNEKILKEIDTYLVPPALGENPGIMGAFALGMREAEMKKRMTILALLLAGAVTLGSYGMVQAGQEKREMPVAGVTQTLAQVLKEAGGVQAQTADAVEELQSNAAVARMMEPEMVAEEAWETAEIAENELPQTASEFADIAVAQVNHYVNVRQEPDTESEILGKLYDKSAATVLETTEDGWYRITSGNVNGYVKAEYVVVGDEELARSVGTRLATVTTTTLFVRTEPTTEAKVLTMLPDGDDVVVTDESTEGWAKVSTADGDGYVALDYVTLSTEYIHAESKAEEEARLAREEAERQAAARAAEEARKAREAEAARAAAEQEATRKAAEKQEVKKSGAGSSAAAGGSSTGSGSGSSAGSGSGSSAGQSAQTASSNGQAVVDYARQFLGNPYVYGGNSLTNGTDCSGFVKGVYAAFGINLPRTSSEQRSVGYAVSLSEIQPGDIVCYSGHVGIYAGNNTLIHASNEKTGITLTSPVTYRSVLAVRRIFMRDKAADRTKESEKWKEFPVDSMWFLCYNTVVAEMKYFCNKMVAANIEEKNTIRESREEISSAYVISAADKAEVPVAGVCRVLSGYSFTTESDEATGITKNPRTMVASTAPSDAAEEVQTPLEEAETPEAKVQAASGEAEAPEAAESKPATVETTTGAENRWNITLTQEEIDLLAKIVWLESQGEPTEGQEAVVEVVFNRMASEKYPDTLYDVLSQGNPTQFCSWKNRERANPTEKEYTSIHEVLNGNTHILRNDTLYFSTEPLTPRLDRKIGGHSFCYMHKVHSIVTSNIFLFILLLSSRMILCELLSHSLFHHTRFFPKVKFSIHKILEKFSLHFPRNAAKACSVVSNTSEECFDALKMINREDMLELTRRMTPSRTSFTRVAGGYMEPDGEIDESFNVNFLNLSAVEKEKNLAIAKAVPFAATNVNLRSYAFGDGAEQRKMRQLLYGMRECGLKNDALLYTFYELVGARYCSREPYAILIFHDRYDVPVKASDKERQGESEEVYEYLIGAVAPLVGEYEPGRPACGFLYPAFADRSTDDAHVALFQADPEHKIPVFEELFLTRMARPTKARRICMEAAYDNFCPNGVPAREKVIMTMDEYETIRLVDLEKCTHEQCAKQMGIARTTVTEIYESARYKMADSIVNGKTLEISGGNYRLCDGTALFCCNKICRRTSTSVGKDDIQRKETDQMRIAVTYENGEIFQHFGHTEQFKLYDIENSQVVRSQIVDTNGQGHGALAGFLTEAGADVLICGGIGSGAQSALATAGIKLYGGVSGAADEAVEAYLAGKLDYNPDVRCSHHEHEHSCAEHKCGEDKHGCAGNEMLSMRNGIEAMITDITATTAEAEDYTGEDGLLYCGKCHTPKEAYFSKETAQWLGHDRHPSECDCQRAAREKREAAESRQKHLETVEDLKRRGFTDPAMRNWTFEHDNGRNPQTATARFYVESWETMQAENIGYLFWGGVGTGKSYLAACIANALMEKEVAVCMTNFATILNDLAASFEGRNEYISRLCSYPLLILDDFGVERGTEYGLEQVYSVIDSRYRSSKPLIATTNLTLEELQHPQDTPHARIYDRLTSMCAPVRFTGSNFRKETAQEKLERLKQLMKQRKESLRKYYYLKLKENFFDSDSIVLLEDMKDGILYSNILLKLYLKSLKNGGKLQLDEHIPYTAQMIATLTRHQIGTVERALEIFRQLGLVEQLDSGAFYMTDIELMIGQSSTEAERKRAARLENKALLPPRTKGGHLSDIRPPEIEIELEKEIEIEKEREGETGHPTPAAYGRYNNVILTDTELSGLKTELPDKWEYYIDRLSCHIASTGKQYHSHAATIYKWAQEDAAKGKAAPKQGIPDYSCKEGESLTPIATYRINYETRQAINEYVDAHGFGNSREAGALQGLYESYLAPNRTRMTIYETIKAAISVKQAAEHYGLKASRNGMACCPFHNDRYPSLKLNEEYFFCFGCGAKGDVIDLVARLFDLSNYEAAQRLAADFGLDPKPPNAAAMVKPKHPRIRQFREDEMLCFRVLTDYLHLLEDWKVRYAPKIPDDALDDRFVEACQMIDYIEYLADVLTVGDLEERVAVVDELMKEGKIAFLGDYVARKRKEGASRGEERMGKKGKTPDMNLPIWFDGQNINEALFCEEFLQERRIIFANGAFFTPDGRVTDDLLLRGEIYDKLKFCAVNNIPRKITNILEVLKLEAQVPDFPPEQDRIHLSNGTLLLNGTFTEGRPTIVRNRLPVVYNPHAPTPVTWLKFLDGLLHAEDIPTLQEFIGYCLIPSNKGQRMMVIKGNGGEGKSQIGAVLSAIFGTNMKDGSIGKISENRFARADLEHILLCVDDDMRMEALRQTNYVKSIVTAQGKMDLERKGKQSYQGWMFARLLAFSNGDLQALYDRSDGFYRRQLVLTTKEKPVGRADDPDLAEKMKAEAEGIFLWAFEGLQRLVANNFKFSESDRIRENREAVKRDNNNIFDFMESEGYIRRKADASISSKDFYEIYRMWCEENSLATLKARSFSDAMIANAKKFNLEHCNNITNSAGRRVWGFMGVEAIARPHINGFYGDSPCTYVPEDIPEEWRQVEMARNDGIDRTVARNQDLETPADVAKVQEHNEREKDSYSNQDIVPERTSLNVHFKAPTDDYVKMFEQMEQDMPRMSKKRRLEWSFFLRQVKAGNTTCDRITYNDLCRGCTHSCKQSFRAVIILCPRYYSKRRKKEDRDNGRMADNRKYYYLKLKENFFDSDSIVLLEDMKDMSISSDGMFASDSVSLPRLDNPTGHVRHTGDNGRTFWQHNEKIYFFDAGTGCIYDSKCGNQSFDFEGMAMNISGLGNTYNGINTNSKQYKALKEKGWLSGIMQNEAMMSPEERMIYETFGGRDTIIKNLMKQFDSEGDLLNANGVAGMDVTSKGTSWQQLTSVSEEYRQKMFDNVKKEFIQENGLSNGDTTKRSDIFKDYQLSVSKDKRLSMADVEEQDIDRLLANPPEKVEIEVKYKIAVTVMELRFWLKDCELPVMNGMDLDDMMMELPPVMDENYMKDADDILEKGARALRLYESSSDYQYIKDQLQMLVDPEDEAVIKRLKAGTAFVWRLKYALRDRNLVLVKQFIDIDARMSQLQRSRILLEMRVSHKSPFERNRAEASWYLNAADLVPVGTVPGGSGNGAGAGKPQDKQPEKKAMNLFWRWGRRVKKWDDRLVARSVIFLLVTSTVIGIWLVWRQNLFIDAPVISKIATVCLFDVMLLVVVYGVMRRQRWYWEDLCNRQELARMLIDNMWYGSDARSNGRGDQDLITYVPHLYFWRRYSITDFPRLYYKRKKGRIYITVKITMGKYQDSLLKLDSKVETGLDCELIASSYKHKWQHYTFLCDVQSSRIQLTEMKCYDGKMPLMRHLKWAYEEHPHALIVGETGSGKTYALMSFIEAVAKSGADLVVIDAKNADLSGLAGYLPEVYFGSADIKEQVIKFYEDMLGRMESMKRCADYEPGRNYRVFGFQARFMIFDEYVAYLSMLQKKEAEEVISYLQKIVLLGRQAGFFVILSCQRPDAKYLPDGVRDQFGLRIALGAMTDSGYTMMFGTTEKRFITKDIKGRGYVGLWDGVITEFYAPYVPPDHHFRESIGAAYAGAHAGGTSGKLFPASAESVASPAPRAVGDKAQRGQGEAMKKFDIWKKVELLKMFFFEKGKMHFVEPDKQGNGLYVNRNCGYVGIYAFYEGRKNGWKTGGMELSGATIRERRKEDHMTQKELAALLGITPTYLAEIETGRRKASDKLLEKINFFLKLYRPDAGLEILLDYCRIRFLSTDIKHILEDVLGIRLKYMIRENHALYGYSAQYLMGDIVVMHSEDEKLGCLLELKGKGCRQFEIFLNAQGRTWFDFFRQVEVKRGVYKRIDIAINDRAGWLDIPYLAEKCRKEEYSTIFRAYRNYQSGELIRAREDDRDQMGNTLYLGSMKSEIYFCIYEKDYEQYVKTGQEIEDADIKNRFEIRLKDDRATHAVEDLLDYEDPAKTAFGIINRYVTFLTPKAGEEDITKWDIDPMWARFIGEEDRQLKLTDAPEPYTLERTLNWIRRQVAPSFKMLHQLAEIRGEVDLLDRMIDEAKLSPQHKKLLKQQQTEVKEMLAERFADMGIRVDPDTGEIMEAMYFGQNAFNLVMANIQPLVLLGIAIIGLVLLVQHKAAGVVMLIVAAIFAVGLVFNPNGAKDAMLSVFNTVIGGGTITGIVPHFLILMRKIKSYSSVWKFEKYLSSVGDLPLPLPVTFVQIAWFAGTFFAILFVFGKMPPLSYCNNVLFEYGVIPGGIAWFMSKXXXXTVQLVEIIFPVSFAAMFQIPIKYIENNLVLNNDKECFAYYEMIPYNYSFLSADQKNQIHDEFRQLVAANKNGRMHFLMIAAETSIRERQERSKQCVGEHKEAAEYFIDRQTEILVADTLADEAVDDDVEKSEMQNDDRNGSQIDYRFFIGIKLVTRDEELTVTRVKELVRDAVIDFVKSVNHELAGDFYSVSNSEMSRYARMEKQLMKRISRRFRFRRMEEKDFGYLMEHLYGQTRVPYYQYHYRLPKERMKEETLVKKYDLLKLSRCLQEEHQRYVKLERQKETVYAAYLSIDTIVGEIAFPSSEILYYSQEALSFPVDVSVNVEIAPNKKALTTVRNKKKEMQDLDDHAFENSQDTDNTVIEGLQAAVELENELTVSKDAMYKVSYVLRVSASSVDVLEDRVDELMELYSDSNIRVSASSVDVLEDRVDELMELYSDSNIKLARPFGDMLGLAGEFIPTSKRYLDDYVQYVTADFFAALGFGAAQIIGEEFGEYIGINTATGRHVYIRPELAAQGVKGSVTNALTKAFLGSLGGGKSMSVNLLATLATVYGAKTLFIDPKSERGQWKEKLEPLGLDINIVELENDEDNRGMLDPFVILRRAKDAESLAMDLLTYLTGVSISDRERFPELREAVRRVGKREQRGMLCVIDELHNAGNPVAENLARHIEGFADYDFAALLFSDGSVPGSIGYDGDMNIIQVKDLTLPDKEKSPDEYSSIERLSIAAMIVISNFALDFIYSDRSVFKDVVLDEAWSLLAVAQGKALVNKLVRAGRAMNAGVDIVTQNADDVGDEKMKNNIGLKFAFRSTDIVEIKKILTFFGLDPEDEDNQKKIKGLENGECLFQDLYGRTAVIYIDPVFNWLFDAFDTRPPQRVEEEVILDEADVEMKQMLSKKKWLVVTFLIVLSYFFVPVTAKASGLVEFNQNSQYLYSTYDLGNYDLDFYVDSSWSWLPWNWMDAIGRQVMYGLYCLTNTIWYLSRLISSATGAVVAEAYRFDLINEVADSIGSNMQHLAGVSTSGISSDGFYAGFLPWVVLVLGVYVTYKGLFKRQFTAALGAAVKTVVIFLFSAALIVYAPTCIRDVNEFSTDISTAALNLGMGVVMPGAEHGDGDSVDLIRDNLFSIQVYQPWLLMEWGTTDTGAIGSDRVSAVLTVSPDGNYGTDRETAVKNEVETYGNMRMSVLKVVARFGEVIFIFIINLVISAFVMLLSGMLVLTQILFIVYVMFLSVSFVLAMFPGCESLLRKSLIKVFNMLMLRVGYTLLITVAFTISTVIYGLSGGHAFVTIGFLQIVVFVGIFFAKRDILGMVSVPEDGGTRRVGSLLGGALIYRGLRQGSRRLNRALPLPVRTAGGTVEKMTQKPRKVVRDKVSIAKERTDGAIDRKLDGLKGTDKETVERKHRAAEAVRRHQERDYTMSDYMPREIGAKFHGRSGTGDKVTSLSVYDRYMDRRKQKPYRLSRNTPGVKEADYTSGTWKVAADKHVRPNLWADMPDKEKADKKYRRRRFDNKAADVFAWDAPGADLKDASRPVSRTQDRRMKHFSFEKRTGAALDKNKVVQGVREQRLKASSGELVKRDTEKADESVMVGEKKVFRSMTGTQHVHPERQNVSQKEYVEKNVPQQKEDADLHRRKTRNYKKSEYQTEGVHEKRKRMIDLEKLKKMKNLKISLLMLQLIWPLLGLLMSASLLIITSSKSKGSVQFQNGMAVNAEVQAYAAIIAQKAEEHGISEYVQYLMAIMMVESGGVGNDPMQSLGTTDLSAEQRIPEMSIEYGVAIFAYLLQRGQEAGVDIDTIIQAYNFGASYIDYVAARGREHELAFAADFASARCSGQKVTYDNEIAVRENGGWRYNYGNMFYTYLVRQYLAGDPLAADASSAIIGEALKYKGWTYVYGGSNPNTSFDCSGLTAWCYGTVGLALPHSAQGQYDAMQHITLEEAMPGDLVFFTQTVSGGNYITHVGIYVGDNKMFHAGNPIGYADLTGRYWRQHFVEVNELARASIGYIESDVMDIKKRYVTLGFHLYEMDQCRYYEDLGYENLYECIEANFAMDKSAVSRCIGVWKKEVDADIVLATDPDADRLGVYCKDTKTGGYVTFTGNMSGMLIAEYILREKTAMGTMWGWLSETEDFMLRQTNQQPITALYPRLSHEDELQGESNSISNQKRILETYAKQNGFSNLRWYTDDGYSGANFMSYMETYKEWCTNPYFDENTKAELAAIGDDAAEIEDRFYRQLEFGTGGLRGVIGAGTNRMNIYTVRQATQGLANYILSQNGQEKGVAIAHDSRIMSTEFADEAALCLNANGIKAYVFDSLRPTPELSFAVRELGCISGIVITASHNPREYNGYKVYWEDGAQITPPHDKNILAEVAKVTSFDQVKTMKKEDAVAAGLYKVIGKEIDSQFMEQFGNLDSNTKHYPIKKLSEIADYWNGLTYKPTDTVQDGTGILVLRSSNIQNGALSFDDNVRVTCPIKEKLFVKENDILLCSRNGSAALVGKTALIKGLTEPMTFGAFMMIIRSSYYPFLKTYFEMPVFRKQISTGTSTINQITGKMLNDISIPVPELKAVERFKLLVDQTDKSKFAAYGRYNNVILTDTELSGLKTELPDKWEYYIDRLSCHIASTGKQYHSHAATIYKWAQEDMKQIVSVGIDVSKGKSTVCAMIHPNTIIKESFEVLHTVEEMSMLADYIGSLDGEIRIVMESTGHYHLPVAQFLYQKGFFVCVENAYIIRQFSRIMLHGAKTDPLDAKKLAKYGLAYWSELKPYKFHPSCYTELSLLSKQYQTYIKLLIAAKQNVIHLMDEMLPGFKEALDTASSVQFSKVKYVDFAKEFYHVDMIKSMGKEIFRENYKQWCKEKGYRFQSEKADELFHLAEDGIPTLPTEFPSTRLCMEVATEQVSQLGYALEQILSQMQNLAKTLPEYQTIRQMGGMGEKLCVRFIADIGDVRRFHNGKALVAYAGIDAPPYQSGQYTGTKRRISKRGNSALRKTGYEVMKSLKSHPPKTDTRVYDFIIKKENEGKSKKQAKIAGLNKFLQIYYARMRLKEGIVVDEVKTFGNLKFSGLRREVYERDEEGNSTGVLIKMAMELKFVAPKMEETFGKLTFAGVGDAETAYVNGRTRVTGRNYHLFSTRQRADDVVVTLPATVGEKHFGYDEPVVLINARLSASGRNIEGSGYTDYKMTADDMVTPEEAAKLAQAGKQIEVLTGFKYIGEQIKFFEQQHTYHYVFGLEESYGCLAGTYARDKDACVAVMMLCEVASWCKKHGKTLWDAMLDMYEKYGAECSKLGKTRIIEDANIRLVRNATFFGPNFHLHFHLKSHGVILMLRKTKIVCTLGPSTDDENVMRSLIEEGMNVARFNFSHGGHEEQFGRLTMLRKLRGEMKRPVAALLDTKGPEIRLKEFASGKVELKNGQTFTLTTEDIVGDESRVTITYKELPDDVKPGDTILIDDGLIGLEVKKIQKVSGAKADAEGKMSMDIVCTVMNGGMVSNKKGVNVPNVELSMPYISEKDYGDIVFAVENDYDFIAASFVRCADDVLAIRKILEEKGGEDIHIIAKIENMQGVQNIDEIIRVSDGIMVARGDMGVEIPLEDVPVIQKMIIKKVSGAGKVVITATQMLDSMMKHPRPTRAEATDVANAIYDGTSAIMLSGETAAGQYPIEALKTMIRIAVRTECDINYLQRFKDRKNMSSPDVTNAISHATCTMAGDLNAAAILAVSKSGRTARMISKYRPYSPIIGACLTEKVYRQLGLSWGVAPLLLEQKNKAEELFDYAVDTAETAGLISKGDVVVLTAGVPLGVSGTTNLIKVQVAGHILVKGKGIAGKKIAANLCVCHSEEDLANFKEGDIIVAADTNNCMMKQMRQASGLIVEADSDSCHAAIAGLSLDIPVLIGAKNALEVLKSSAYVELDSENGVVTAIMKKKKIVIALGHDALGTTLPEQKEATKRTAKAVADFIREDYQVVITHSNGPQVGMIHTAMNEFCRLYPEYTATPMSVCSAMSQGYIGYDLQNAIRAELLNRGIYKTVSTILTQVVVDPYDEAFYKPSKIIGRVMTEEEAEAEEKKGNHVTKVADGYRRIVAAPKPVDIVEVDAIRALTDADQIVVACGGGGIPVLSQDNHLKGASAVIEKDLAAGKLAELLEADMLVILTSVDNVCLDYGTENERPLSSMTVAEAKKYMEQGQFGEGDMQPKIQAAIDFIGDSAIRSVLITKLHVDGSQVTPGMGTMITKMVIKNVNLEIVCGITSKIPDTAYNEVAFAGKSNVGKSSLINALMNRKALARTSAQPGKTQTINFYNINDAMYLVDLPGYGYAKASEEVKAKWGKMIENYLHTSKRLKAVFLLIDIRHDPSANDRMMYEWMVYQGFAPIIIATKLDKIKRSQIQKNVKAIREGLGVQPGTTIIPFSAETKQGREEIWELIDSLVLPQDEMDTEILKIPAVALRGMVILPGMIAHFDISRDRSIRAIEQCMMDSQKIFLSAQKDVEQEEPGADDVYHIGVIAEVKQVIKLQNNIVRILVEGIERAEFSAFAQTDPYLLAEVAPCVLPEEGLSEEAKAAMVRSVQETYSRYQTVNPRAGKELLRQIGTIQDLPKLMDQVANNLPVSYEEKQKILEAMTLTERYEVLMALLLKEIEITAIQNEFQSKVKERVDKNQKEYILREQMKLIREELGEDNTESDADEYQKALDALDADQEVKNRIKKEIDRFKSISANSSESAVTRGYIETLLELPWNKASEDNKDLANAERILEEDHYGLEKVKERMLEFLAVRNLTSKGESPIICLVGPPGTGKTSIARSVARALDKKYVRICLGGVRDEAEIRGHRKTYVGAMPGRLVNGLRSAGVKNPLMLLDEIDKMSSDYKGDTASALLEVLDSEQNHKFRDHYVELPIDLSEVLFIATANSMQGIPRPLLDRMELIEVTSYTENEKLHIAREHLLAKQTERNGLKEDQFKVSDGALAKIISGYTREAGVRGLERRIGEIARKAAREIYEGKSSTVDVTVRNLKKYLGKEKYSQDMRGETDEVGIVRGLAWTSVGGDTLEIEVNVMPGKGEFQLTGQLGDVMKESAQTGISYIRSVGGQYDIPAEFFQKNDIHIHIPEGAVPKDGPSAGITMATAMLSAITGTPVRADVAMTGEITLRGRVLPIGGLKEKLLAAKNAGVRTVCVPKKNEKDVEEISGEIKKGLEIVYVETMEQVLRVAFCEKKEMAGRSDDEIRCSFCGKSQGQVRKLIAGPKGAYICDECVDICAEIIEEEFENEEETGTAEETEQINLLKPEELKAFLDDYVIGQDQAKKVLSVAVYNHYKRIMAGDDLGVELQKSNILMLGPTGSGKTLLAQTLARVLNVPFAIADATTLTEAGYVGEDVENILLKIIQAADYNIERAQHGIIYIDEIDKISKKSENVSITRDVSGEGVQQALLKILEGTIASVPPQGGRKHPQQELIQIDTTNILFICGGAFDGLEKIIETRMDQKAIGFNADIKSKNEYNIGDVLKHALPQDFVKFGLIPEFIGRVPVTVSLDMLDRDALIRILKEPKNALTRQYEKLFELDGVKLAFDADALEAIADKALERKTGARGLRAIMEAVTLDLMYHIPSDESITECEITKDLVEEKLSIEEQKLKTIEEKMSLVPYVVEQTSRGERNYDIYSRLLKDRIIFLGEEVNETTASLVVAQLLFLESEDPNKDIQLYINSPGGMVTAGMAIYDTMQYIKCDVSTICIGLAASMGAFLLAGGTKGKRYALPNAEVMIHQPSGGAKGQATEIQIAAENILKTKKKLNEILAANTGKPYDVVAADTERDYYMSAEEAKAYGLIDDVIIRKDTKKEESKMSVQVENLEKNMAKLTIEVAAEEVEKAIQAAYLKEKGKISMPGFRKGKVPRKMIEKMYGEAVFYEDAANTLIQENYPAAVEESGIDIVSRPTIDVVQIESGKPFIFTAEVAVRPEVKLGKYLGVQVTKIDTSVSDEEVEAAVEKERNNNARTVTVTDRPIANGDTAVIDFEGFVDGVAFEGGKGENHPLEIGSHSFIDTFEDQLVGKNAGDEVEVNVTFPEKYQAADLAGKPAMFKVKIHEVKCKELPELNDEFAQDVSEFDTLEEYKADVKKHLEVEKENEAKKTKEDEAIQKIIDKSTMEIPEAMIETQCENMVNEFAQRLAQSGLSMEQYMQFSGLTLDKLKEQVRPEAETRIKSSLVLEQIAKDEKIEITDEELDAEIEKMATQYGMEADKLKEYIGDNEKESMKRDLAVTKAVDLIMENVKERAKAKSKKEKEAEEKEGTEEMRLDRTAIIRYIKKCKNVIECNCVTGDYSMLLEVLFENTMELDRFIGELQYFGRTKTLIVFSTSVEHRGVELMEHTGNKTENTKATALITAVHRERYEILVEQETSDTKLNARLKTGVYYQDKGGEAFPTVGDRVRIQTNRCGDALILETLPRTSVFYRENPTPGMERQAVAANFDYVFLVMSMNHDFNQNRLDRYLTAAWESGATPAVILTKKDLCEEPEYYVNLVERQAPGVAVCAVSAVTGEGMEHVQRYLGAGKTVVLLGSSGVGKSTFVNALCGETVMDTGAIREDDSKGRHTTTYRQMILLPDGSRVIDTPGMRVLGVGDAKCGMDTTFSDIEELAQHCRFRDCRHEKETGCAVQEAVRDGRLPERRLLNYKKLLAEAAHAKRREETARKKQLRSVERKKNPVRKKQYKAEMIYEPREITCRDGRSCILRSAAVTDANDLIRYLKVTAGETPFLIREPDEISLTPEQEEHFIEGIVKEPRELMLIGTVAGEHVGNCSLLSLENYERYAHRCSVAIALYQKYCGLGIGREMLKTVLAVAKQCGYEQAELEVVSTNTPAIRLYESLGFEIWGTQPHSVRYRDGSYADDHFMVKRLVMSEKPVFAGICVGSDTVQIDFLTITEENVEKIKCRSDTDHREETQLMKNIVFDMGNVLTKYKLSDYIGTYTEDEAQAVLLKNQVCASVEWICMDRGTMTDEEAVCSICKRIPQSEWELVERFVREFRMKQEPNPPMEALLGELKEQGYHLFLMSNTSHRFRAFSKNIPSVGYMDGIWISCECGYLKPEREAYVDFFRKMKIEPQESYFVDDSPANIEAGIRLGMRGCVYHQDMPELRRNLREAGIDLKDAMQKILIVVDMQNDFIDGALGTPEAVAIVPRVEQKIREFPGKVIFTRDTHGERYLETQEGKHLPVPHCIKGTKGWEICPQLEALREAEAIDKVTFGSEKLGELLQEENRKEQIEDITLVGLCTDICVISNALLLKAFLPETPIIVDASCCAGVTPKSHETALDAMRMCQINIERMAVNSYREDEFMENTDKKKIFRRLFSYLLDYKAILIGVLLCMAVTVAISLVNPLLIEEAIDHYIANKDMRGLMGLGLFALGLNIIFIIMVKIRMYVMAVVSNKILLRIRQDLYEHIQTLSFSFFDSRPTGKILARIIGDVNSLRDVLVNVVTTLIPELITVIGVVVIMLIKDWRLALASLSTIPLMIGGIWFVQTASHKRWQIFRKKSSNLNAYVHEDIAGMNVVQSFGAEEETREIFGNLTDEHQQSFVDAVRYADMFGPVIDFCWGIGAMMLYLVGVRFLGFEKVSVGLLVAFGTYINMFWNPIMNLSNFYNNLVTNLTAAERIFDILDTKADIVDAADVAELPEVQGRVEFSHVSFTYDKGTPAETKVLSDVSFVVEPGETIALVGPTGAGKTTIVNLISRFYDIEDGVISVDGYDLTKISIESLRRQMGVMTQDNFIFHGTVRENILYGKLDATDEEMIAAAKAVNAHEFIMKMEKGYDTELKEHGAGLSIGQRQLIAFARTMISMPKILILDEATSSIDTHTEILVQKGIEALLSGRTSFVIAHRLSTIQNADRIFVIDQGGILEQGSPAELMKKKGAYYDLYMAQFAGLEMKKLYTYIGRYWYGYLFAVFSMVTAIVLDMLYPKITQQIVDDVIIGGKLELLTKLLVGIVIVGIGRSIFGYCKEFTFDVLASKIGSAMRKDLFDHIQSLSMGYFEDTNTGELMARVKDDVDKIWNAMGYVGMLVIEVIIHVSMVLYCMFSLNWKLAFVPLATMILCGTVAIIMERKLDKIYEDISEENAVLTTVAEENLAGVRTVKAFAREKHEIEKFLSHNNRYYELNVSQAKVLTKYYPLFSFVGKVLPVCSTILGGIFVMNGEMTLGALVAFVEYSRNCTWPMEMLGWLTNDVSSAVASYKKIRKIYVEQPKIKNDEHPKVLDEIRGEICFDHAGFVMDGQKILQDINVTVPAGKTLGIMGATGSGKSSIVNLLQRFYDVTDGAVKIDGVDVRKMDVHQLRSNIAVVLQDVFLFSDTIEENIKMGQRKELQMEAVRLAAEDAKARGFIEKMDEQYETVIGERGVGLSGGQKQRISIARALAKHSPILVLDDSTSALDMETEHEIQQTLNALRDTTKIIIAHRISAVRHADEIIYLADGKIAERGTHEELLAKKGLYYDTYMAQYGALAMSSASAGEPAPAACCMTFKKRYAYTGFCKTTCNLNFKEREVSIMSRITSNVVEVKKQNHMIASVGSNGQKMSGSSNSNSGTNQMAVPQAKEAMNRFKQEVASEIGVPLKDGYNGDLTSAQAGSIGGEMVKKMIMKQEEQMSGKMSKEIALQQIRIKDPFWSGMQEKITDTVIPFQERVLNDKEEGVEKSHALDNFRIAAGLMEGEFYGMVFQDSDVAKWLEGVAYSLVIKPDAALEQRADDIIDIIAKAQQPDGYLNTFFTIKEPEHRWQNLLECHELYCAGHMMEAAVAYYEATGKDKLLGVMERMAQHIMNRFGEDKIPGIPGHQEVEIGLMRMYHATGKEAYKDMARYFLEERGKNPNFFKEETERRGWTHFGNMIPDDTKYNQSHATIYEQDEAVGHSVRAVYMYTAMADLAAEDHDEKLFAACRRLWENMTQKKMFITGGIGSTVEGEAFTKEYELPNDMNYAETCASIGLVFFARNMLKTEKNGRYADVMERALYNGIISGMQLDGKRFFYVNPLEVNPGVSGEIFGYKHVIPERPGWYACACCPPNLVRMVTSLGKYAWDEDETAVYSHLFLGQEAALGKADIRVESAYPWEGSVTYHVSAKIDELFTLAIHIPAYVKDLRVTVNGEAFDTAGEIRDGYLYISRKWGSDDQVELHFPLPVRKIYASTHVREDVGCVALMRGSVVYCFEGADNGAYLQALAVKKELDAKALVCTEGKLSGLTLLDVAGIRLVPSEELYTEEPPKEEAVTLRAIPYFAWGNRGLNQMRVWMHEKMNQFFDYNNNVFRVLGGLADCLILGALWIVCSIPVVTMGAATAAVYHAVNKSIVHGQGYAFREYCTALKTDLKQTTGAWLLWGILAAFLAADLVVTRQFLAQGSALGALYYFFIVLSAMALAWEFYLTAYMARFEGTIRESMKKTLVMVVANLGWSALLVAVFVLFVLMCNDTQCLIVLFPGVFALVKNYVLEKVFRKYRTPEDLARELEMTREYRNMAKLVINNDKKMSTIAPEIYGHFSEHLGRCIYEGLYVGEDSDIPNVNGMRTDVVEALKEMKIPVLRWPGGCFADEYHWMDGIGPKASRKKMINTHWGGVVEDNSFGTHEFFELCRQLGCKTYVNGNLGSGTVREMSEWVEYITFNGVSPMADLRKQNGHEEPWKIDYFGVGNENWGCGGNMRPQHYADEYRRYQTYVRNYAGNDPIAKICCGPNVDDYEWTKKVMETCFDHCEPRFHGMMDGLSLHYYTLPEVEDDWNKKGSATDFTEEIFYQTLKRGYFMDELINRHGAIMDEYDPDKKIGLIVDEWGIWTDVEPGTNPGFLYQQNTMRDALVAGMTLNIFNKHSDRVKMACIAQLINVLQSVMLTDGEKMIKTPTYHVFHMYRHHQGATLLRSDLIGAGTVGAGKNELPKVIESVSENADGVITVTLTNNSLEAAENVTIQLTDDGAAYGVCEASVVAGTMNAHNTFEAPEVVTEQAFADYEKTADGIRVQIPACSVVSIRLKKMADEKNRKGDKGPKSGKTKRTVGTVLGTGFFAVLSLIIIFPVFAGLLASFRPGTELIRRGLSIDLDIRTMNLDNYKYLFSGNADSQKYFMWYKNSLVITIVSVVLTLFICYFVAYGLTMYNFKLKNFLFFLVIATMMVPFEILMLPLYKEIIALHLIDTYTGVIIIGLCNASTIFFFRQYLSGLPRELLDAARIDGATEYGIATKIILPLTKPAFASMGILQAMGSWNAILWPLLVLKGAEKFTLPIGLNTLLTPYGNNYDVLIAGSMFGILPILVIFLIFQKYIIEGMTAGAVKGMKLKKFLYSEKVAPYIFVIPFILSFAFFWIYPLITSVTMSFQDIGAIKSEWVGLANYQKLLKDNVFHTAIWNSTKYMLFTLVLLIPFPMLFAVLMDSRLVKAKGVWKAILYMPALTSVVISGTLFRLMFTEYSTGQMNIITAALGLGTYKWLKMGWSGMTALLVVACWRWTGVNMLYFLSGLKAIDSSLYEASEIDGASAWQKFRYVTLPLLKPTTVYVLTISIYAGLAMFLESYMLWAGNNSPNNIGLTIVGYLYKRGIEKNDMGYACAVGVVLLVIALAINIVQLIANGTFKNEEKMRRKVFSALMCAAMVTSLFAGCGSSDASTTASNSGSTTGDGTEAAAEDAVEDATESAESEVVTNTFGDPNGTHLEMWTFVELHGQHYGKMAEVWNEEHPDQTIEITCTTYPYSDMHTKLLTALQAGTGAPDICDVEVGQFPNVVAGLDQWLVPLDDYAAPYMETMVKARMDTYAGEDGHYYGAPYHVGATVMYYNVAAMAEAMGISEDEVTAKIDSVVTWDDYQALGDEYVAAIGEEGKYFTSVDTGGTDWLWLAMAEYGDDWTGGFDDPANVQLDSVQKMLEMQQSWLDSGFAEVSPDGHVDLEAGFQNILDHNIVSFPKALWYMSRFTNYMPEESGNWYIAKCPVFEAGQKCSVGIGGTGTVVTQQSASADLAAEFLCWAKMSDEGEKNIWDTLGFDVCNTACWTDDAFAHDDSNQYNAYFRNYPYDVLNSIGMDNIGKISVVAISPTINEYVCNTTLNEVLEDGMDVSDALQELQDAVDLEQMIHITSLDDGLETFKALGSDTRIQILNILLENEQMSMNQLATELNISNGALTGHVKKLEECGLINISNESAGHGNQKMCSVTQDRIIVDIKKPIDYKNVFETEIKVGQFSRHQVWPTCGIATSESVIGEFDDIRYFNHPDRFTANILWFTKGYVEYTIPNLIPSNQRITQLSISAELSSEAPGIDNNWPSDISFYINDTKIGMWTSPGDFGDVHGMFTPQWWPQNWNQYGLLKLLVINDYGTYIDGLKISDVSTLSLHLDYNSDIRLRLAVENDSEHVGGITLYGKSFGNYDQDIRVAINYAPLVAAQPMQLREVFFKAKCEYFFRAASGIKFRVFATLMCTRCLLRDMIEAGDSMEMIEKYRAAIKEADRVTEEIYESRLSVCQDCEKLNAGTCMACGCYVELRAVAKVSRCPKKKWMEKQLKYNEPWILQRADPYVYCHTDGTYYFTASVPEYDRIVLRRAAHLADLADAEEHEVWHKHESGPQSIHIWAPELHYLFGKWYLYYAGGDKDDIWAIRPYVLECQGDDPVHDPWVEKGKMTRADGDEFSFEAFSLDATVFEVNGSWYYIWAEKVGVGRQISNLYIARMKNGYTLDSVQVLLTTPDYDWERHGFWVNEGPAVIQKDGKVFMTYSASDTGVHYCMGMMTADADADLLDPLSWKKERYPVLTSSEKAGIYGPGHNSFTKDEAGDDIMVYHARTETEIVGNPLYNPNRHAMLMKIRWQDGRPVFGFDEMRNGRRTISVLLVAAMTAGLAACGTTEAAENVTESETPENTDYNFTVSYDGIQTGDVSSGVAVHDPSIYEEDGTYYIFGSHMSAAKSEDLLHWESIADGYNKTNPVYGQIYGVADEAFAYAGSKNSLIQTDDKKTHVWAPDVIYNKKTGLYYMYYCTTSTWNASNLCYGTSKTIEGPYEWQGALIYSGFDKDTIAGTDVLDYVDEEYALKHYVRNNGYNFEEYPNAIDPTVFYDADDRMWMVYGSWSGGIFLLELDPATGQVIHPEADEEHNVDAYYGKRLLGGGHKSIEGPYILYDEATDYYYLYVSYGTLTSSGGYQVRVFRSKTVDGDYVDMNGEYPTADVDHQLYGLKLTGNYKLPSLERAYMATGHNSAFIDEDGRQYLVYHTRFNNGTENHSPRVHQMLMNEDGWPCELPYQTQGETVSGTGYETDAVVGRYFVINQGTNISNDIANPVILYLNADGTVVGREAAGTWEAVDGTYYMHITIDGEDYSGVFCQMKDEAGTDVMTFSAVGGNQSVWGVKYIAEMFTDRTTKRWRGSWKRQSARKNPGMYGYGIVAASLVMAAGLTGCGEAKEVALAKTESSNPIVKTDEGGERIYGGDPSVLVDGDTVYLYTGHDASTDEQVANSVYEIPEYLCYSSTDLVNWKSEGTVMTMDTVDWAKDDVSAWASQVMKYNDKYYLYYCSWDKSGKQSIGVAVADSPTGTFVDIGEPLVRGSVTKPQLSTFNDIDPTAWVETDENGEEHRYLAWGNGMFFMCELNEDMISVKDMNGDGEITSGTSFDDADIMYQKGGIENYTEAPWLYRRSDEQGNYYGDYYLFYAYGWRECMAYATAPDLTSGDWTFGNVIMYPTSTSNTNHMAVFDFKGKTYFVYHNGSLPGGNGYRRSACITELHFNDDGSIDYFEETTAGLAGTAVTLQSAAGDGALLSHEGFVNSSADVDYPMKNVKVGTGLGDLSTDEKWVLCDGKADASNEYYVSIQSENKSGLYLTAQTDGTVVLAQDVDAAEETAQAQTFHTMEGLSDKKGVSFESVLMPGQYLTLQDGKLVLTDGSDKKAATFYLNMEHSLEKNACNFSSRMTASDSVSLPRLDTWWAHVRHTGDNGRTFWQHMSKIGIFMADGCEEIEGLTVVDIVRRAKMDITMISVNGKREVTSSHGVTFLADAVAEEVDYGALDGIVLPGGMPGTLHLLDHAAVNEVIKKFAGEGKLVAAICAAPSVLGAAGILEGRRATCHPGFEEKLTGAATSEDAVVVDGNIITSRGMGTAIPFALEIVRYFADDAAVEHIKDGLVYHVVQMEIERKYLVKILPDHLEQYPCRQIEQGYLSTNPVVRIRRSNDRYILTYKGKGLMVREEYNLPLNEESFTHLKEKIDGLLIQKRRYLIPLGEKYTIELDVFEGALAPLVLAEVEFETEEEANTFVPPEWFGEDVTFSTKYHNSTLSQRTFSSEMVGDAVGDDTSETLHIIDFGCGKSYLTFVLYYYFTEIQKRNVQIAGLDLKADVIKNCNAAAKKYGYENLHFEVGDINGYRTDAPVDMVVTLHACDTATDYALYNAIMWNARMILSVPCCQHELNGQIQSEDLGLMTRYGIIKERFAALATDAIRANLLECCGYKTQVLEFVDFAHTPKNLLIRAVKKGGSDAARAIVPAAVRKRYLGEVERMMEEFHLDPTLYRLLKEAGRLGSVQYVSVIRPGEKVAKLVKRMHYVSFVGMFRSDLFEGLCVGHAPKKCRICGKWFLTTNARHTKYCGGYAPGDKLHRTCRQIGNLKGREQRELADDHPVKQIYEKRMTLEESKEVIPMMEAMITQIEEQQNIMAEMLQEIQEKDEKLMCFQEQEERLQQLESELSELLQILPNTEELLMLLEEKTDQIQKLTDENQQWQELAQKLNSENRLLQKQNSELLNLNSNMNELRNSKSDDQLEELLLLTEQMQEELDQKDRTIRELKMQLDESLTLNERLNSENRAGNIQALKNDLRKTKELLQSEKEKTHAAEIMTEECQDKLRQAEQERDYALSHQKKVEIPVEKPVLYQKCGNCNLTAYLKAKERYDTQREKLAGRYKAKTAIYEALMFLLIWYSVSTTLFQMIRSKIFISDCVVFFDTIATFIQNIAGLTILAGKNVAQVSNGISNPVVVGIIYWMIRILISGGCLVGVGILLAFIEIKIAGLYKKYCWDMITIMVILVSMAIAIYFAGWIRTILPVNLLFLLLLVQVIYVVIRWYVKGWRETRGYYMIENKIILIEDDKEIRGMINDYLSGEFEVTAFNDGMSAIQKITSYDEYALALIDLMLPDISGMEIIKIIRKVSKIPIIIITAKDNDIDKSLGLNLGADDYVVKPFSLIELTARIKANIRRARTYQALPNNSIIKIKDIEIDPHSHMVQRKGVTIDLTPIEFQILYILASHPGQAYSKERLYELIWKEPYFGNENVLNTHINRLRLKLKSNAEDSTAYVKTLWGIGYKMEEKMMILFVVLSFVMVFILIWQQIQHKKLVREIDYITSRLDTISVISENGFVLIPTDNDSIKKLSAALNKLLQDFYTKKSQFEQSKQAMAKVLTNISHDIRTPLTVLKGNSEMLSNITNTYSASENVHAMAVKIDQKADDLISTINDYFTMSKITSGDFSIKMKKENISRICQDTILDYYDLLEQKQFEVNIQIPDTPIFAYTDNEALQRILKNLIDNAIRHGGDGKYISLRLITSNGKNIIEIEDRGDGISPQQQKQIFERNYTTARKTSGSGLGLSISKCLAEQIGADLEVYSVQNEQTIFSIILKKLENRMDYIMETVGLRKAYKDNIVVDDVNMHISKGAIYGFVGPNGAGKSTVMKMILSLIQPDAGEVQLLGEKVTSHSYEIFKKVGSIIENPYFYDKMTARQNLELHCEYMGFPNKERIDEVLHLVDLQNVEKKQVCHYSLGMKQRLAIARAILAKPEFLILDEPINALDPEGIREMRTLFQRLNQEDGTTIFISSHILSEVDLLADTIGIIQHGKLLTELPIEEIHKHQTDYISLQVDDVTRVTALLENMRITNFSVLDKEFIHIYDSDISGKALSKAIIENGIGLESMGRKQDTLEDFFFQLTEEEKMTHLIKLELKKFGIAQNIIFMFAAILFSILFITISLWDSMTDPKQVKDTFESTYLVIGLLMSFIFLVYSSVLTAKLVIGEYNHRTITIMFSYPLNRIKLIASKLTIIMVYTAISMTIGYICCSSYIIFADKSFNMLEGTFQPSMLRTWIPMAITTVIICMVLSLWSFIIGMIRKSVPATIVTSLIVIVLRQVIITKNTTNQESIMQVILVAIVTVIATLLIFKRKVPELYMRTIFAEYNPQRNSVDVYTSASYMLRIDCWEAEKNLKTTPGSDCALNALAIDEPLEYVRLYLDGNMQMWVDAEDSLEIFMTDQIAYQEYIQRRYNAFCKTVIRCAALDKILKLKRQWERQVSLDYLMNEKFVQFAASEPDEEYPFTVCGQTVLLCNAALADAISVLPEQTREEILRYYFLRQPQRVIGACIGRSRSTAGRHIQLALQRLREEMGVSRYEMSRLLPYETILKAREGDPEAVNAVLLHYAGYIRYFSKVNGQVNAEVEDYVKQRLIDCQFKFRLDEPPDKSMEHLPVVEGKEKGFLQHRVETTASGVILAKAGRNALYRISSSRKRETNFCGCSFPKKWRTEVRESLQSRRASFYHGAKIRNSAVLPLAGNLLGSAFPKPCSCALTGEKGGHTMRKKYNTPHRSRVVKTRLSEDEYADFTARLAPYGISQSEFLRQAIRRATIRPVVHVSSVNDELLSAVGKLTAEYGRIGGNLNQIARYLNEYGVPYNTLSGEVRAAISDLAVLKYEVLKKVGDAVGNTQAYQLMATLKHINSKNADYGAAEQYLLFEHDEFTMKPVLDETGRLIPREDYRLSTLNCDGEDFAVACMRANLRYQKNQRREDVKSHHYIISFDPRDGPDNGLTVDRAQALGEQFCKEHFPGHQALVCTHPDGHNHSGNIHVHIVINSLRIEEVPFLPYMDRPADTKVGCKHRCTDAALRYFKSEVMEMCHREGLYQIDLLNGSKNRVTDREYWAQKKGQAALDKQNAPMIADSITPRQTKFETNKEKLRQTLRKALATAASFDEFSSLLLQEGVTVKESRGRLSYLTPDRTKPITARKLGDDFDRAAVFAVLEQNAARAAEAPARSPDPPRTIKDRLQVARAEIAAPKQDGVQRLVDIEQKMAEGKGRGYERWAKIHNLKQAAKTLSVYQQYGFTSPEQLEAAVDTAYQKMRQTSGELKALETKLQGKKKLQRQVLAYAQTKAARDGLRAQKSEKARAAYRQAHESDFIIADAAARYFKAHGITKLPARKALQAEIEQLISEKDGLYNTYHEQKQRFKELQTVKRNIDQILRRDEPHRRKEQSHERMSDNLPHMDYRQHRRARRLVHECCNYDEGNCLLLDDGEPCVCVQSISFSLMCHWFRVAVLPLDGELAAALLCRGSRKRCAVCGAAFVPKSNRGKYCPDCAGRMKKIKAAERKRKQRQRCHALEPFKPAMGVKGYAIHLSFSPGNGVLMRDNTPKSTRTQGGDPIADYIRADTRLPAYLPYPRFLLKMEISQTAKLLYSLLLDRSTLSQKNKWLDDEGRIYIIYPIAEIAEILDKGSTTIKGALNELDTAGLLERERGGFSAPNRLYVKVPPVPQVQFSDQLMAGSPPLIEPENRPTDGQKTDLMMVGKPSPNQTTINNLTESQTKGVSGGPSAPYGRYGNIFLSQTEYDELQAEYPDRLERFIEEMSRYLAANGKSYQNYAAALRIWAGNDKKEAPKKGIPDYSCKEGESLMKNEINAVLENMTTTIPEPEDYTGEDGLLYCGKCRKPKEAYFAPDKAAIFGRDRHPAECDCQRTAREEREAAEKRRRHLDTVEELKRRGFTDPTMRDWTFENDNGRNPQTGLARRYVEHWEDMRTDNIGCLFWGGVGTGKSYLAGCIANALMEKEIPVRMTNFALILNDLAASFEGRNEYISRLCRYPLLILDDFGMERGTEYGLEQVFNVIDSRYRSGKPLIVTTNLTLDDLHNPEDTAHSRIYDRLLSMCVPVRFTGDNFRQETAKRKMESMKKLITDMADNKQHDTRTTRRPDCVTEIRMGNSVLVVSGYFKKDTTTTAADKMARVLEAEAAATQEPTYPAMKYTIDELTAAKRQIDSTLHKLRETVKTFESKDNSERYKSQITLAKRRIKAFEIANYFIENEIKNCMLRQATQNLITALYPRLSHEDELQGESNSISNQKRILETYAKQNGFTNLRWYTDDGFSGANFQRPGFQAMLADIEAGKVGTVIVKDMSRLGRNYLQVGFYTEMLFPQKGVRFIAVNDNVDSASEGMDNDFTPLRNLFNEWLVRDTSKKIKAVKKSKGMSGKPVTSKPVYGYVMDEDENFIIDEEAAPVVQQIYQLCLAGNGPTKIARMLTEQQIPTPGTLEYQRTGSTRRYHPGYECKWATNTVVHILENREYTGCLVNFKTEKPSYKVKHSIENPVEKQAIFENHHEPIIDKETWERVQELRKQRKRPNRYDEVGLFSGILFCADCGHVLYQQRYQNKDRKQDCYICGSYKKRTRNCTAHFIRTDLLTAGVLANLRQVTEYAAKHESRFVKLLVQQNEIGGKRKTAAAIKQLEQAQERISEISRIIKRLYEDNVNGKISDERFMELSADYEAEQAELKKRAAALQAELDKSQAATVNAEKFMGIVRKHLAFEELTPTLLREMIEKIVVHECSYDENGTRRQDIEIYYSFVGKIDLPEMKRAAPFAVRRNRKRSTSYRFLMEMQMEYSFEKNVSISSGMTKKQKRMLVRIIISFVLFAALMVAEHTGALEGINTWILFVIYLVPYLVIGYDIVYKAVRNISHGQVFDENFLMMVATFGAFGVKEYSEAVAVMLFYQVGELFQGYAVGKSRQSISAMMDICPEYANIEVDGKLTQVDPDDVEVGSVIVVKPGERIPLDGIVLEGESFIDTAALTGESVPRKAAAGDEIISGCVNGSGTLKVQTTKEFDDSTVAKILELVENASSKKARVENFITRFAKYYTPVVTIGAVILAILPPLILGGGWSDWIQRACIFLVISCPCALVISVPLGFFGGIGAASKVGVLVKGSNYLEAVAEMTTIVFDKTGTLTKGEFKVSEILPAEGSKEELLEIAALGEGYSNHPIAASIREAYGKELDMNRITDAEEVAGHGISVRIDGRNVLIGNEKLMKEKAIFYEPCKSIGTVVYVAGEGKFLGSIVIADTVKDGAKEAIASMKKVGVKKCVMLTGDRKEAAEGIAAELGIDEVHAELLPQDKVSQVERLLKEVNGKEKLAFVGDGINDAPVLTRADIGIAMGSMGSDAAIEAADVVLMDDDIRKIASIVRISRKTLGIVKQNIVFALAVKAIVLVLGAFGVANMWEAVFADVGVSVIAILNSMRALKTEMKKKFKLEDLDCANCAAKMEEAIKKIPGVNDANVSFMTQKMTVDAEDDKFDDIMKEVVSVCAKVEPDCKILMMSEAELECCEDVEIHQDRLKIVSDQMPEEEELYDLAELFKVFGDSTRIRILFVLFEAEVCVCDLAEALHMTQPAISHQLKILKQAKLVRSRREGKSVFYSLADGHVRTIIAQGREHIEEMQIGITGKQTITVTEEKTAQAMGSGTLPVFATPAMIALMENTASKSVEAKLDEGAGTVGTLINVKHVAATPVGMDVTCETKLVEVDRKRLVFEVKAYDAAGVIGEGTHERFIIDNERFLAKAEAKKNMKRIWRMAGVVTVCMALGFATLGADIQTAYAQEEVRGAGAQTADGWSYETKSDGTLTITGYSGTEKKVTVPATIDGKSVSGIGSSAFYNNKVLEEVTVSEGIQSIGQQAFSMSTLKKLWLPASLNVFKDGEDVCEMEGIYVDSANQSYKDVDGVLYNKNMTTLVKYPSKKTASTFTVPNGVTKLEDCSMDSNTSLQKVVLPDSLKEVGYWSFMNCSNLSDITLPEQCKSVGQYAFSGTALTSFYIPAALETLMSGTFLNTDISSITVSPQNTTFYIDGKGGLYKHNQSVFYPANGNQIHRGCETLLYYYGEDAEYTILDGTITIETYAIELKNNLKKLVMPDSVQTLESSWIQACCNLEEVYLSPSLSIVDNSSYTETRAKKVYGYETTENHAVADKLLSNGASGTFVSLGTPYTVTYYGPGANSSYKTYTMGTLRRPVWKEPGDNCGYRYYYTDGTGSRKEITSWPITISQNMEITVENGSQNPDSGNNGGTDSGNNGGTDSGNTGGNTGNDSNNGGNSGDTGTALTGKQHFASLLYENALGRTASQSELDYWAQELTNGRTGAEVAYGFLFSEEFQNKNYSDADYVEHLYLSLMGRASDEGGKADWVTRLGNGVSRLYVFQQFTDSVEFGNLCNTYEIQRGTVTLTESRDQNYNVTRFVARNYTEFLGRTYDVDGLNDWSGRINSGYGMENVAYGFVFSQECINMNLSNSDYVKMLYRGIFGRSYDDAGLNDWVNQLNNGSSRETVFWGFANSQEFANMVASYGLMQKENIIQKLKERGCRITKQRLMLLDIILEEDCSCCKEIYYKASRLDDKIGTATVYRMVNTLEEIGAISRKNMYRITCDQGCEMENACTIEFDDNTIVELSSSKWNQIIQSGLLACGYLNGHHVRSIMAKSYEMGTFVVGAILVIVVCLIVRSMIHDKKNGKSLQCGGDCKNCGGHCSMAVKIALAGNPNCGKTTLFNALTGSNQFVGNWPGVTVEKKEGKLKGHKDVTIMDLPGIYSLSPYTLEEVVARNYLIGERPDAIINIVDGTNIERNLYLSTQIMELGIPVIMAVNMVDILEKTGEKVHIDKLSQKLGCEVVEISALKGTGITKAAEKAVALAQQKGAVTPVHEFSKEVEDVIHEVEAKLGSSVDEAQKRFFAIKLLERDDKIGEQMKSIPDVSYEIKKLEDAFDDDTESIITNERYVYISSIIGECVTKPKNSQKLSTSDKIDRVVTNRWAAIPIFAVVMFLVYYVSVTTVGAILTDWTNDTLFGEWIIPGAQSLLENAGCAAWLTGLIVDGIISGVGAVLGFVPQMLVLFLFLAFLESCGYMARVAFIMDRIFRKFGLSGKSFIPMLIGSGCGVPGVMASRTIENDRDRKMTVMTTTFIPCGAKLPIIALIAGAFFDNAGWVAWSAYFVGVAAIVCSGIILKKTKMFAGDPAPFVMELPAYHWPTVGNVLRSMWERGWSFIKKAGTIITLSTIILWFLMNFGWADGSFGMLDFGDLEGAALEAAQAECILAKIGSAIAWIFTPLGWTQGGNGWKMAVAAVSGLIAKENVVATFGMLFGFAEVAEDGAEFWGNLASVMTPIAAYGYLVFNLLCAPCFAAMGAIKREMNNTKWFWFAIGYQCGLAYIVSMCIYQIGTLITTGHFGFGTVVAFLCVIGFIYLLFRPYKESETLNVNVKSAVKAKMMNYTEKEQSMKTLKEVACGQTVKVKKLTGEGPVKRRIMDMGITKGVDIYVRKVAPLGDPVEVTVRGYELSLRKADAEMIEVEMMPLSMVKEGEPNIIKKVGGKEETRKFLENLGFVTGGTVTVISQTGGNMIVNVKDSRVAIGKDMANKIMVMGEKSFKKGFLWGGATAANQIEGAYNEGGRGLANTDFLKYVAPNERRADEATFEQTYASLQEAKAHEDTYIFPKRWGNDFYHHYKEDIALMAEMGFSVFRMSISWSRIFPTGFEEKPNEEGLAFYDKVFDECHKYGIEPLVTMLHYDFPLAVCEKLNGFESRETIALFEKYVRTIVERYHKKVKYWLTFNEINMSLQSLSTCSGAMRDHSLKGLDEEQLTFEVVHNMLLASAKAVILVHEIAPEALAGNMVWKHVYYPKTVRPEDTLQQIFDMNLNYYFYDIQCKGVVPYYLDRYFEQKNIKRNYSPEDIETLKKGKADFLSFSYYMSNISEYQGEPMKFTGLLPDQSRNNPYLKMTDWGWSIDPVGLRIALNQLYTRYGLPIFIAEFGIGMYESMDSNHQIHDQGRIEFVEAHLKQIKEAIKDGVDVFGVTYWGWIDLVSSTTSEMTKRYGFVYVDADDYGKGTYNRYKKDSFYWYKHVIETNGSEIMDSEKLVQVAMNVIMHAGDARDYIRKAGTKLSALDLDGVEELLKKASAELVEAHKAQTSVLQNEAEGDSVPMTVLFSHAQDTLMTVESEQYMISILYQCLKNMKKGEKMKFYMKLQDWLAGPFSQKMQKFMQNPYMHALQVCFTIILPMIMVGSLASLVNTFRNFAPWLPDLSLINSFSFGLISIFMAFLIPYTIMESKKLQKQKMITGFASVSALIALANPQYVDGNLVINSGYVGTGGMTVAMVMGLVIGWLFSAYFKHGLFKKDSSLPSVVVVWFESILIIFVLILVCIIIGQNVDLFSLLEKVFSPLAAIGNTYLGFLLFYMIMALCYCCGLSAWTVWPIVCALYLTNIAANAAAVAAGQAPIYIATDELVFMGWCCLGGLGCTLPLNILMIRSRSKKISTIGKAAIASSIFNINEPVMYGLPVVLNPVMMLGYMTVSFVVPTITYIVFKLGLVSIPAVAMMMNFLPQPISTFMVNSDFRGIILWAVLFVLTYLIYLPFFKVYEKQELESEQEVNTLRKEEKNGMKIMDNEFIKNITEEGDNVMRILFICGNGVSSGMIASRTGKAGKAQGYDVDTEAYSYTELPEVIDDFDVVLAAPQMKCNEEMIRETCEEHGKKYAIIDNYAFSTLDGTKCFELAKNLIMNNLQKLLTVLKQSDTPLSSRQLSSLLSVSDRSVRNYIKELRNAGEQITANENGYLWIGIKNDEPDSPGNKSQALFAFATPEERINYIIEKLILAKSGLDLYDLADSIYISYSTIEKDMIRVKKKLALFNLSIHRQNGTIDIVGEEHHKRALFSHYLTSNLDSTIDLTLESFCKLLNISPDSLRAIVHEALQTENLYASDYAFKSIIIHVIINMTRIKIRECLLEKPLYDSVTIHTAEYRAASRIFDQISRLCPIQFNENELQQLAFIIMTKTSAINVNNVIDLPRIVDSALIQFVNEIIKQVKTIYYIDLYDTDFINFFTVHLSNALFRCRHNVSIRTPLSDEIFIQNPLIYEIAVFIAQEIKTTFGYELNKDEITFISLHVGAVLGKKMDEHPEIKAVLVVNNYYNYYNKHSLESITQKLSGKCKIAEVTNTLDDVNPAYYDLIIDATNQVLPQANLRVIQTNTIITEHDFKKIQSVCNELLAEKKRRIFHDKLISFMDPQLFEKNHYENSVEDMIRYMAEKLVALGIAPEAFTDSVLEREAVTPTSFDNKVAIPHSIVCSTQKNIGFVIVNEKPLRWGTFDVQIIMMIGVNHQQRMDFKYVYSNLLEHFENSTTVEKLIHASDFHNFIDILTSMLFQINSMWQLLGWVLVFAGLVILNEIERRTKLGGYGIFVGVLAILTVYFIAIQISAVNGGWGATNDTYVYMGGWFHYAKLYAAAFGCIGFMFLKYKQWIGKTDWFKVWPFVIVAINIMIAVASDFESAIKGAQAVNGWWYSIEDVWLNGGWWNWVNGIAGILNIFCMTGWWGIYASKDKNHQDMLWPDMTVWFIVAYDLWNFTYTYNNLPTHSWYCGLALLLAPTFANALWNKGGWIQNRANTLATWCMFAQVVPMFQIKGRFSVLPVLYSNVEGFESLDAFSLTTMDLTSVAPNTKVQGFMAIIALVANVICLSVIIKRAIEQKKNPYKNEIFADTKDFKVAIARAEKMKLTVNAAGFNNSVQMGTKDGQSVRTVKNAAFGGATKLGEDPVAKRREEARKQAWKVVENAWKNDRSVDDTIQSHRDSYAELENRKKGALAAIDETNQQKEALREQCGVDADSQEQQDLLLLEKEQDYKNGVLDEGLTDEEYDRLAEIHKKPLTGYQKQALELNNYAAGHKREIRRADYGMTAEKQNVSRIKLERLKTHAMVDAQGAADDIMDAANDEIIGMLVQEVKDQQDEKMDEAKEKADEAMKEKEKREEKLDEMKLERAIERAMIEGTDEAVEEAERIKRQNDSPDIQMTDMVDLADSADLKKSVDQNLGDIKSSMKVLEADLKGIKVDEKAMDKRTLSDMARCNRTAMICHLVEASMITITFIAQLLVGSRGLLYSLLVVVLAMGPPLMELFFWSRDKESPAIKHLVAQGFAVMYTVILFTTTNNMLFLYVFPMIVVISVYNDKAYALKVNIGVVIENLLVVILGATTGRFGFRDMSSGMIQILAVLLFCAYSYIAAATSETNSREKLQQVKDAQGETEKVLGDVSRNADVMRRGINEIHAKVEQLQSASETTKDAMGQVTIGATDTAEAVQRQLAQTETIGEKVGLVSTVASDITERMEKTLSVLEKGKADMDTLVGEVEVSVRNSANAADKLETLNQYISEMNTIVELINGVTSQTSLLALNASIEAARAGEAGKGFAVVASEISELATQTKSATTNITQLIGNVSGSITEVVTVIREMIDGINDEKEMSENASQSFGTIEEHTYAIRDNVTRLTESVSQLESANQEIADSVQTISAVSEEVSAHANETLAAEQENMQHLLTIAGRSQELIALTQTEEQQMELWTEQIRQAHAGDKDARNRLVAENLGLVHAVTRRFEHRGHDREELFQIGCIGLMKAIDKFDVSLQLAFSTYAVPMITGEIRRFLRDDGMVKVSRTLKENGYKIRRAGEMLTRELGREPTMEELAEAAGLEREEIVLALEANREVASIYQPVYERDGEELLLIDQMEGSGGQSAEREEPEKEAVLNHILVEQLLETVGERERRLLQLRYYEGKTQCEVAELLSMSQVQVSRLEKKLLLQLRERVRMMHSKNEVELSFDARSVNEGFARMAVAAFITELNPTMDELSDVKTAVSEAVTNAIIHGYDNPEEKVHMTCRIMGREVEIIVCDTGRGIEDVAQAMEPFYTTKPELERSGMGFAFMEAFMDEVHVQSAPGKGTSVRMKKYIGVQEGMERYCEQEKSCLRVYVPRELDHHEADRLKQEADFFIETGQVKTLVFDFAGTEFMDSSGIGVIIGRSRKMGYFGGEVYAEHLSGRILKIFKVSGLHTLIRTSVPKQQKEREGEKHNAMECYNCGAKLGKGDICQNCGANVKIYKKIIMASNAYYNDALEKAAVRDLSGAIESLRTSLRFYKMNIDARNLLGLVYFETGEVVEALTEWVISKNYQPRDNAASRYLNEIQNNPSRLDTINQTIKKYNQALLYCRQDSRDLAIIQLKKVLSLNPKLVSGHQLLALLYIQEKKYDLAKKSLRNAGKIDANNTTTLRYLKEVNAGLRENNPKKQKNEDLISYQSGNETIIQPRYLKDNSAIGTIINMVIGIAIGAAITCFLIVPGVRREIQNQAKAEVLDANNAVASKNQSISSLEAQIEDLTSQITDAKNEEESSAGKVNTYEQLLQAYVAYTDGDIEKAGTALGNVNTDYLSDDSMTVYDTINAQVNAEYISAVYKEATDAYNAQEFTQAIEDYLKVIELDETYDNGNALYYLAQSYRRNDDMDNAKTYYQKFADLYPGTERAANAQRYLNTEEMINFEEELKNFKPSLEVEEAEQAIYNHELTDMTDVLQEILQDMKRGMMAELTQQKPIIRITFDEMEAYMLLPEPEQGTGYTDSQIRQEMAARGITTGIDEQRISDMLEGHTYNAELLIAQGKKPVDGTDGYYEYKFDTNFDGKPKLLPDGSVDYWSVHSIESVTAGQVIAVYHPAVSGEDGMSVKGGLVPAKHGREQMPLKGKGFDRMDDEVTYTASMDGKIEMQNDRIVVLPVHEVSGNAELAEGNIDFRGDIVIHGNVESGVSIRATGSITIDGVAEACMLEAGKDIILRGGMLGGNKASVKTKGAITAKFFEFTNILCEGDLQADVLMDCSVICHGQIRLTGRKGSIIGGKVQAIRGLIATSLGNDAEKRTEIFVGAGIDVYSRLRVMEKKIEMTREELAKIEEGLEKFEILSKERGVSYTNDPRRTSLLRIKIKDSAMLASDEEEVRKLRILAESSRGACVSVIQEIYPGVIINMDELKLALKNMATGVEFYKLPDKIGTRPCSAGVEMCQNCSKELAKTYDPKGIEGRLYKKWEDNGYFHAEVDRSKKPFTIVMPPPNITGQLHMGHALDNTMQDILIRYKRMQGYNALWQPGTDHASIATEVKVIENLKKQGIDKHDLGREGFLEKCYEWKDEYGSRIINQLKKMGSSADWQRERFTMDKGCSDAVLEVFVKLYEKGLIYKGSRIVNWCPVCKTSISDAEVEHEEQDGFFWHINYPVVGEEGRFVEIATTRPETLFGDTAVAVNPDDERYKDIVGKMLKLPMTDREIPVIADPYVDKEFGTGCVKITPAHDPNDFEVGKRHNLEEITVINDDATMNHFAGKYEGMDRYECRKALVDDLKEQGLLVKVEPHSHNVGTHDRCGTTVEPMVKQQWFVKMDELIKPAVEAVKNGDIQLLPKRMEKTYFNWTDNIRDWCISRQLWWGHRIPAYYCPDCGEMVVAKSAPQKCPKCGCGHMEQDPDTLDTWFSSALWPFSTLGWPKKTEDLDYFFPTDVLVTGYDIIFFWVIRMIFSGYEQMGKAPFHTVLFHGLVRDSQGRKMSKSLGNGIDPLEVIDKYGADALRLTLITGNAPGNDMRFYWERVESSRNFANKVWNASRFIMMNLEGAAITEPSADELQPADKWILSKVNTLAKDVTENMDKYEMGIAVQKVYDFIWDEFCDWYIEITKTRTYNKEQDPVSANAAFWTLKTVLTEALKLLHPFMPFITEEIFCTLHPKEETIMLAKWPEYRADWNFPAEEEMLEHCKDLVKGVRNVRTEMDVPPSRKAKIFIVADDAALRETFEKTREAYQNLAGASDVSVQADKNGIEDDAVSVVIPGATLYLPLEDLVDFEKEKERLLKEKERLTKELARSRGMLSNEKFLSKAPEAKVQEEKEKLAGYEQMMAQVEERLAQMNRMNGRYENGALPEKVRLLYEAVLAMVTDGWDINRMKVSDITAQAGIGKGTAYEYFSSKEEIIANAVLYDVEMRLAHVLEITKGEGDFAGKFVQILTYMEEVFAKRQAFCLLVRIGTGSYEVSESMRRECEKRQQALGCHLADRIVESLMCQGVSEGTIGETNPYLQKLAFVAQMTAFAGYLVDLEKGEKMAVSREEAKRFVYEALVKSLNMISKFSVKRPYTVIVGVILVIVLGVVSFTRMTTDLLPDMNLPYALVITTDVGASPEEVEADVTAPVEASMATTSSIKNVSSVSYDNYSMVILEYEQSANMDSILIEIQQKLDQLEGSFSDSVGKPMIMQIDPDMMPVMVASADVEGMDESEVSSYVENEFSPALESVEGVASVSATGVLEESVQVTMDQDKIDALNEKIQKKIEEQFADAQKELDDASAELENGEKKLESGKSELANQVSAAANQIENGKIQAYVGASELKTNMTMMTEAKKIMEKAIPALQQLYNDGIAARQQLEALKNMLTPEQQEAIAGGSAQIEQQANAQLATINESIAAWGQQLESLGIKVQTLDDLPYAIADMTQKLAEINTGIATMQEAQKQVDAGKIALDEASAQLTKNQIEGILQLSEATAQLADAKNQLAQGQSQLDAAKDSAKESADLNQILTVDMLGNLLAAQNFSMPAGYVGEGENRYMVRVGDKLDSVDELKQVVLIDLGLDGIGPVCLSDVAAVELVNNAGESYSKVNGNPAIMLSIEKQTGYSTGDVTKRIQQKLKAMEADNPALHTAILMNQGIYIDIIVQSVLENMIVGALLSVIVLILFLKDIRPTLVIACSIPLSVIFAVVLMYFSNISLNIISLSGLALGIGMLVDNSIVVIENIYRLRSEGYSIKKAAVEGAGGVTGAIIASTLTTVCVFVPIVFTEGITRQLFVDIALTITFTLTASLIVALTFVPMMAAGLLKNPKEVRHAFFEKVQQGYAKLLELALRFKPVVFIGVTVLLVTSALAAYSRGFFFMDMNMETDQLTVTVAAKDDEKLTFEELCERADEVTEKIAGIDGVETIGAIAGGDSALMSMGGSSDSVTMYLLLEEDSSVTTGEITAQIAELTKDMDCQVDTDNSASDMSSFLGSGITVQIKGSDLGILQELAGKVAGVVEAQEGTVDVDDGLDNTTQSYTIHVDKEKAAEYGMTTAQVFQLVYAKLASQTAVTAISAGVQDYEVYVRSEEQANVSLDDIKNLTFSYEDKMAQLSGTGSDEEKETDEKLSEDTKDTGDAKDIEDTEDTGDTGDTVKEIPLTEIATFEAGSSLNAVSRDSQTRYISVTAGVDDTHNVTLVANALMKELNKIDLPEGYSIEMTGEDEMIADAMQQLYLMLILAVVFIYLIMVAQFQSFLSPFIIMFTIPLAFTGGLFALFFTGNEISVVAMIGFVMLAGIIVNNGIVMVDYINQLRRGGMTKKEALLNSAKTRLRPILMTALTTILSMSTMALGLGDGSEMMQPMAIVTEGGLIYGTLLTLFVVPCIYDAFNREKNMVEEELMTETGFLIFMGILLLLVVIVVVVVVASSVAGTAAAIADDDDEEEMKAEVAHFTTEQMVDMVGLLSPCMDDYLYVCDFKEDYYQISPNAVKRFCLPADHFHNVVEMHRQVVYPDDLDLLLVELELLSTGRKVFHNLHYRWMGKNHETIWINCRGRVLSDPEDGSPRYLVGCINEIGAKQKADNVSGLLGEYSLKIFYESRSPKLPQGFLLRIGIDDFKNINESHGNEYGDYILRRTAQCIEENIGPEQSLFHIVADEFAVVDFSGGSVQQAEDLFHEIKKSIYAFIEQNQYKAVYTVSGGIVKNGDVDNSFENAMKLSEFALSEAKERGKNSCYVFEEEEYEDYLKSRTLLRQLHHAVNNGFEGFEAYFQPLVNAANGELTGAETLLRFHSPEGGMVSPGEFIPILEESGLIIPVGRWVLRQALDACREWQKILPEFKVNVNLSYVQVLKSRVLTDVRRIVDEFGVKPSSVCIELTESGYLEENERFDKVWNGLKEYGVLLALDDFGTGYSNLRCLSDLKPAYIKIDRSFTLKALNREYEYRLLNHIVEMSHSLGLHVCVEGIETEGELTKAKQTEPDYIQGFLFGKPCSRAEFTQKFFTKQAGMSPQNKAVTRTDGYVIYYTEKIGKDNVPDQTRSVDIRSAKYGISNSAVFAICDDPCLSKFMAKTQNEMKNTAEKNFTYFAPTNVHARVHPELEPSRLLTVAAYHNAIVPCDCHIFMETREVHKGMNIHTRRAIAYVVLTIISFFCLFWFYILFVNATRSNGQLQSGFTLAPSSHLLENWKNLLAGTLPVWNGMLNSIIVAGLSALVSVYFSTMTAYAIHAYDFGLKKFIYPFILMIMMIPTQVTALGFVQLVGKMHLEDSFIPLIVPTIAAPVTFFYMKQYMESALPLSLIEAARIDGSGEFHTFNQIVLPLMKPAIAVQAIFTFVSSWNNYFTPALILHDDKKKTLPILIAQLRAADWLKFDMGQVYVMIAFSIFPVIVVYLILSKHIVQGVALGSVKGMKKKSKAVRYNKWGYIFLLPFIIVYVIFQLIPMVTTIYNSFFENYLSGLTQIGPNFVGLANYKKLFSDGDIWVYAKNTMVMWIMCFIPQIFLSLLLGAWFSDVSLKLKGQRFFKTVMYLPNLIMASAFAMLFFTLFSDSGPINSLLMQIGFIDTPYKFLSNVGSTRGLVAFMNCLMWFGNTTILLMAGMMGIDTSLFEAAEVDGATSMQVFFKITLPLLRPILVYVLITSLIGGLQLFDVPQILTNGTGDPMRSSMTLIMFLNKHLYSKNYGMAGALSVVLFFITGVLSLVVFKITGNDKRKGMKKKIISALLCASMVASMAAGCGSSDTADTTTTDNTASTPATEAAPAADADTEAATDATASDEGKVLNIYCWNEEFKSRLEDHYPGYTIVDGTTGTIGDVTVKWNITPNDDNAYQNNLDATLLKQADAAADDKIDLFLVEADYALKYVDTDYTMAVKDLGITDADLADQYQYTKDIVTDSNGVLKGVSWQGCPGVLFYNREAAKEVLGSDDPADVQEYVKDWDTFNDTAAKLKDAGYKITSSANDSYRVYSNNVSSKWVTDGKITIDDNIMKWVDDSKELVDAGETSTAELWSDDWKKGFYPDGKVFCYFGPAWLVNFSMAAEDEGSIANLGGWGATQGPQGFFWGGTWICAANGTDNPSLVKDIMLQMTTNADIMKDIVVADDDFVNNKTTMEAMAEDTSYSSKVLGGQNPLAMYCAGVDGLDLSNLSAYDQGCNEEFQNAMKNYFEGNATKDEALDLFYKAVEEKYPELTHMVSLKTIAEKCGVSTATVSKALNDQKDVSEETKHRIKKTAEALGYFPNAAARALKTNRSYNIGVLFEEEAGSGLTHEYFSGVLNGLKVQAEKQGYDITFINTCFENRKMSYYEHCRYRNFEGVAIVCADYNDPDVLELMNSDLPVVTIDYVHHNCTAVSSNNIQGIEDLVKYIYQQGHRKIAYIHGQENSYVTKDRLASFYRTMDELGLEVPDEYIRTADYLETKEAARQTRELLNLADVPTCIIYPDDTALIGGRNVIIEMGLRIPRDISVAGYDGTRISQLLHPKLTTIRQNTELIGSEAAKRLIGTIEKPRTTLVERVVIEGSLVPGQSVGKFLQKMKFGYFDDAKKEYVITSPRTPLPWINYLGSKDFFSLISNTCGGYSFYKDAKLLRLTRYRYNNVPFDSNGHYYYIKEGDTIWNPGWMPTKTELDSYECHHGMGYSTFRSSKNDLSAELTAFVPVDDSCEINKLTLTNNGSAPKTFSVFSYVEFCLWNAMDDMTNFQRNFSTGEVEVHGSAIYHKTEYRERRNHYALYAVNAPIAGFDTDRDSFLGAYGENSAPEVVVTGASKDSMASGWAPVGSHHLSVSLAPGESKTFVFVLAYIENPIDQKWVGRPEDGVINRAPAEALMARYDTTEKADAALAALKEYWDELLSHFTISSSEEKLDRMVNVWHQYQCMVTFNMSRSASYFESGIGRGMGFRDSCQDLLGFVHLIPDRARERILDIAATQFEDGSAYHQYQPLTKKGNSDIGSGFNDDPLWLIACTAAYIKETGDYTILDEMTPYDSDPSKATDFMEHLRRSFHYTMEHLGPHGLPLIGRADWNDCLNLNCFSTEPGESFQTFGPSEGPNAESVFIAGMFVRYGKDYAAICRHRGMDDEAAVAEKAIADMEKTVLDAGWDGEWFLRAYDHYKNKVGSKECEEGKIFIEPQGFCVMAEIGLKEGNCLKAMQSVEKYLDTKYGIVLLQPAYHRYHVELGEISSYPPGYKENAGIFCHNNPWISIAETVVGRGNRAWQVYTRTCPAYIEDISEIHRTEPYVYSQMIAGKDARNFGEAKNSWLTGTAAWTFLDVSQYILGIRPDYDGLVIDPCIPSSLDGFTSRRDFRGTTYHVTVKNPNHVEKGVISMIVDGKDVDVSGISGGMIPIALADGKKDVNVEVVMGLQMIIYKNILSQLKDAGYNTTRIRKEKLLPQSTLQRLRNSDPISTETLNIICTLLNCQPGDILEYIPDEIPNAETVESFSEIGTGNGTHFKGNTKNLFKKCKICGKWFLTTNARHTKYCGGYAPGDKLHRTCRQIGNLKGREQRELADDHPVKQIYEKRMGVDKKILEQYVDACEMIRETEQDIKRLKRKRQTIVWGWLSETEDFMLRQTNQQPITALYPRLSHEDELQGESNSISNQKRILETYAKQNGFSNLRWYTDDGYSGANFEALRGTVKEVITQVSRSKKWESKPVLGEDGNPMLNAKGKKILKSSYSVLQDDFFNFMRNAGYTDVERGERGSTEEHLTVTQFKVQAEQQRLEAVTGQVAQAEQNLEDAKAATAKQKKKLESLQKETKAAKTIALTVQDIEVMGKKATFGNNITLTPNECDTLKRYAVNGIIANADNKRLKEKLASAEKTVSIWKQRYEAVNEKYMELKQKAQPFLDALEIASEKVRAFINSILIRGKQTQEHEHPARKRGQDMELMKKYYEEAKYNAAFDRCVDVMSQMLQKYGHQVLDKLEQDAPQGVEHSEESNQAQLLTDKAAMPKHTVYLEPYAGSLAVLFNKPRCHIETVNDLHGEVVNFFRVLRDDPDELKRLIELTPYSRTEYDLSYQKSDVNVERARRFCVRCWQGFGCSNLYHNGFKSGQQTNSPNPAKAWAEYPDVITQASKRLQGVQIENLPAIDLIRRYNTSDVFIYADPPYLQSTRKKYLYKYEMTDADHLEMLKALEEHPGPVMISGYENDLYNTALKGWRKIKKDTLAEAGVKREEVLWLNYADTQMSFEADMDLEKQAIDILQTFAGNEPYQLGYSGGKDSDVILHLAKKAGVPFVAVHNLTTVDAPKTVRYIKSKPEVLIEYPKMSMWQLIVKHKTPPTRRFRYCCEELKERSGVGKKLITGVRKAESRMRAKNQGIVTFTTPNKKIKDSVDNENLRLTEKGGVVVLNYENSESHRIVESCYRTSKTLVNPIIEWDDEFLWWYIRHEGIEINPLYKNGCPGGCSRIGCIGCPIGGKNRYKEFAEYPKYKEAYIRAFDRMMEYRKQCGNKDIIGWKTGNGVFDWWMEDKNIDGQYSMDFDGIDLIGFNEKGNDLETPADVAKVQEHNEREKDSYSNQDIVPERTSLNVHFKAPTDDYVKMFEQMEQDIIKCFMPVIRLDMQILRGDIGGSILYVVEDIGNNIRRMRKNKEKVVREESGNTNSGWKVVLEKVKVYREKKHQERVDSGDAELPVLRVGTNKRAVRILWGLMIVSLAFGIYKNFTAVDTNTVHERTVVEAKVQDTNELESFVERFAYIYHAWATDQNARSERQGLLKSYMTDVLAGLNGMVIGTDCPTSSQVLDVRICKVADLGDNAYRVRYMVKQLLTETGSDETASISKKELPVVATSQQMEEDDNSTVVVDDFEGTQTGETAEDVAEQPELATELSDSADADVDAEVKTSYGDAVTLSTETVRNEDGSVTTNTTRQSYFEIEVYVDEAGGMVVVTSPTSCGVPGKADYNGKEYQTDGTVDSASMLQIEDFLNTFFGMYPMATEKELAYYAVPGTMDVIGADYVYDGLYDATYYKEDDQIKVHVYVKYLDQVAKVTEISEYTLTLEKGDNWRIVAAEMQMKLGKLLAETKTGEKRQIEPEKDGRGQKYEFELAGYHFFVRDMVKKTEESDKENQEYFITRRIVGKRKEASGKKEGIALSMYLEFGEETDIFRVGIPSAVYGAYVSREESTYHSFMEDRLTGVMLLLFDEDHKKSTVVQKMNPAKYIEKEERKRGEGRYLHKTETTSIGYGFGEAAYVKLCWPYEEREKSVALDSMETPAQAFYPLEEEQIELVLEYRVAHKECKTFTDGLYQEYQELSRRLVKRGEKTVRLPFSREEGIQLRRKCVGRTYREFGPDGAGFFFDFDPEYGYESEPSGFGTSFHTIPHKTYTHILEYGFTGRQLNIALDLAMHSEDYFRKAERVIDFFVNYCITENGWVYSLYDTEKGAPFASFGDASAPRLHYMYYEKCKGNYLRTMTEPMLDLLEAYLWYRKKGVKKEKWLESVIRFANFLLEKQNADGSWCRAYSMTGEPVYMNDREDYTTEENDRGRKASTIIPVMFLCALANCLGEEKYLQSAKKAGNYALEHEVRWELYQGGTMDNPNVVDKEASQYMMAGLYHLYQMTKSPEYLEGALCAAKQFVTWNYIWNAPMRKGNILFSRGFCTKGMGAINSIWCGGVVDIYSLFHIRELYLLGKEAEESFLIEMAEDISIATQQILSWSGDTMGFCDSGMQPEGFGICPQGMDEGMIEKGDIWGTLGWIYSAGISGMERYLKVITMKRRITSMLLAAAMTITMLTGCGSQGKETEKTDTGAIVLDMYHSWSTDSERGAALDKLIQEFNKEYEGKIEVKVTINPDFPAYQEKVKTMISTDTTPDIFHYNFNPNDLSRQKSGKLMDFSEYMDDEWRARFGEGDLENLTIDGEITSIPFEKAGAVFYYNKEVFEKAGITEFPKTWDELLEACKKIKDSGVTPISLYTADDAWYTCNLFTYLAAGYAGVDALNKGGDINTEQMKAAAAKLKEFWNYTTGDAIGANYSVAMNNFASGKTAMVIDGPWLIGSLGNDIKDKIGIAQAPTFGDGTVSENYVITDAQTPWAAAKTDDKEKAEAIVTFMKYITSEESVKQLTLEGAVFLSPKLDMEDPDVQGTGGLLGEYLALNANAEESTVNIQRNLSTAANSKLPSLLEELALDRLTPDAFIEQLAAENKMKGQQRLLYLLPACILVFAFFLFPLAYLSYISFFEWDGLGPKTFVGFENFEYVFSDPIFRTAVKNTIVWLLSALLLHIPFGLLLALLLNRKPRGWKVFRVMYFIPNVISTTAIAFLWYFIYHVDVGLLNNMLNAVGLKKLTHAWLNDPTTALWCNLVPFVVYVGLTMIIFMTQLSTIPKELYEAAVVDGATSLQVDLKVYLPLLKPAFITNIMLNLAFCLRTFEYPFLMTGGGPANSTMNLSLYIYKEMVGANRYGISMVAGLVTVFMGLIVMVFVNILQRERRNCHAMHKKKITPTGALLYVFLTVVLVFMMIPFVWLLISSLRPNADLFNEPFAVPKTLSFENFRAVMESHPMLLYFANSVAIATIATVIAVGAATLAAYAMQQRFLTRKSLTVLFSMCLFIPTNAFMVPYYVMINKIGLYDNVLGIALVYAGVNLPMSFMVIKGYMDTIPGELLESAKIDGATAGQSFWKIILPVSKPGIVTACIFLVINSWNELLFANLLNQSDSSRTIQVAIRSFLTTFEANYAYAFAAMVISILPTIIIYALLTDRIIGGMTAGAVKGMIAMKIMIVEDEENIRDGIRNLVDWNQEGFEEPLLFSSAVEALVFLETETVDVVLTDLYMPVLNGIEFIRMLREQNQVCEVIILTGHERFELAREAIALGVKQYLLKPVTGQTLLTELHKVSREIQERMRLKDWVDIAKKKLHDYLPVIQNQFWNDLLLGNLIELKKIKERAEEAEISIPESEMTCLAVQRKGEQLERDRITREMALRELTEEILGEKYLGALFYNGMEMVICKGRISRDYVEILNESVKHNFGYSISIGVSTAQKDATNLRNLAREAMDAVQSIHEEDVISYIYYRDIENKKKERVEYPYEEERRILHEIRFQRLPDRNLLRKFLEKLLPPRYSVEKSKMLLLQFLLALVRMADELEIDVATEFGKAEASIESLQKVEEALERMITRMVSEKEKMSRRYTEILVQSARNYIQEHFADEELSAGKIAEAVGVTPNYLSRIFKSITGDTCVSFLGKVRLDEAKKLLRDSSFKSYEVAEAVGYKNPNYFGAMFKRYTGYTPKEYREASYEDKNMKIRIKSVKSKIIVFFIGLAAFQICVMAGFAKLQLEPSIVSMYSEHLERFADVALTETTQETEKIERYMVNIIGDAQIQDFLRRADEEQSAELPPVLSTELRNRILSYTDYDNIITAIYLVDNYGRIYSNLGKSPMQTFMNRNQELKDRKEESAVWYGGENGNTITVYRNVNNNTTDLTQKIGALCIFIDRKMFQERIDDLMMEEEQHYVLENEERHLKISSDQDETEERDSIVVMRTDGRWGLRTWIEKDIIYRPVKMMMRILLAELFALLLVSIALVVFLSERITRPIRKLTIAMKEIGAGNIDTVVLDEGEDELGLLAATLNRMSKSIKKLMEQIHEDEKQKRYLELKAMQYQINPHFLYNTLDSIAMSARRNQDRQSEEMTHALAEFFRIGLSHGAEYVTVEMEVRYVKAYLEIQNMRFPDLLTWECSIEHGLEEIKILKFILQPLAENSIYHGFRDSGECGHIEIRVYTSGKNLQLCVSDNGIGMMPEQLEILKSRMAWKQMTEQSIQEGGFGLQNVQQRLQLVYGTKAGLHIESEWEEGTRITVVIPDIIKTHSEKEGSVMEKARPVSLKEIRIRDNFWDKYRRLVREEILKYQWCAMNDQIEGAPKSHCIENFRIAAGEKQGEFYGAVFQDSDVAKWLEAVAYTLAEKPDKELKKLADRVIELIGRAQEPDGYFNTYFILKEPGQRFRNLREGHELYTLGHMIEAAVAYKRATGEKRFLEIVQKMADLVANTFGVEEGKRMGMPGHQEIELALMKLYEETGKESYKELAKYFIDVRGCGNRNYFLEEMKQKDVKRIFPELNDYRPEYSQSHLPVRKQRTAEGHAVRAVYMYAAMADIAAEYDDEELLGACETLWNNMVHRRMYVTGGIGSSGILERFTADYDLPNDYNYCESCASIGLAFFARRMMQITKKAKYVEVMERALYNTVLAGIAMDGKSFFYVNPLEVWPPSCMERTSKEHVKSVRQKWFGVACCPANISRTLASLGEYIYACEKDTIYVNLFIGNETQITVGEQKVHLSLETDFPWKNQFKINVSGVKESVQLAVRIPEYAQDYKIFCEGREQFYKEKDGYAYITCEKNGRYEVQFVSEPRFVRANPKVRADEGKVCVMWGPLVYTVEETDNGENLQALYIDTAKPVKKSEKEEFPMLIAAGKRICESGWGEEELYGSHPLEFAETEITLVPYAYWGNRENGEMAVWLKEYLSDRNNKMKTVAIVACSNGQKEEYRSQNEELARYLEKTGHKVLWSNDIYEKNAAFSGTGAERAAELMRFFNDPEVEEIYDISGGDLANQVLDGLDYAAIGKSRAVFWGYSDLTTVINAIYAQTGKSSVLYQVKNMVWGEIKEVQRRRFENRTALFDPQVRFVQGEKMEGVVVGGNIRCFLKLAGTRYFPDLWDKILLLEAYGGEVPQMATYLAQLKQLGAFEKVGGILLGTFTAMEAHACSPDITALVKEAAGTKITIAKTQEIGHGNDAKAIRIGEKIYCCGDEACRSVVTDAERRQLETRMKKEMTYTELAKETAILTAAVAIIAAAVYFFLVPSHASVSSISGLGIVLSNFIPLPLSAITMILNVVLLIIGFFTCGKEFGVKTVYTSVALPVFLGIFERIFPDYESLTGSQELDVLCYILVVSVGLSILFNRNASSGGLDIVAKIMNKYLHMELGKAMSLSGMCVALSAALVYDKKTVVLSILGTYFNGIVLDHFIFDHDMKRRVCIITEKEEELRRFIIEDLHSGATIYESIGAYNMQKRNEIIAIVDKAEYQKLMNYISREDPHAFITVYTVSDIRYQPKRQQMEIYDNADSSYKAAGAETYHLPVLYTEDERSSYAAWGIKKEKLLMPFAIVTIIIDAFVLCATVVYLFEVQRQKPAFSVWLSCWGGVVGDVSYGVALVLTVLILKPLDWLFDKIMHRPEQPKMLQVTPKETGVSYLILRGTTVLAQGLLPWNAWEAALTVETNEILLEGQRLRIGSNTIASIYPPEKQKPWMDHPAEQITGTISLAHIRKNMQGYLASLEEQKREAEWRRQNPMRYPKNLSEHGTIGFVAPSFGCATEPYHTAFLNAQKKFREMGHPLDLGPNCYADCGIGISNTPEACGRELTEYYCSDKNEVLISCGGGELMCETLDAVDFEQIRAAVPKWYMGYSDNTNMTYLLATLCDTASIYGPCAAAFGMEPWHQSLSDAYALLRGQKHTVNGYDLWEKESLKDAEHPLVPYHVTEQRILHVFPEPTEALTVQGRLIGGCVDCLVNLLGTTYDKTTGFVEKYKNDGMIWFLESCDLNVMAIRRAVWQMKHAGWFSHVKAFLIGRPAVYGQELMGLDQYHAVWDLLKDYGVPIIMDVDIGHLAPMMPLVCGSYATVQVNGNDISVKMEYLMSNTAYIGSGTTLSSKYYLRSFYRSNREAGTSSKRREFSGNQLALADGRALRQAVRRLTSSDFSDDQDANTRNSVLAYIQTYNNMLSSAGSSSDRTLERSAKQLKNITSEYSSELDKIGITVNDDGTLTSRTTLFESADLSKFKELFSADAAYMQRTSTYAKRFASRGEALVTSDNNLLMQKKNAAATGSSATDGTTTSGATESPDDGTATTAAQIVSQSLDLDTLLNTGIGKNINLILMEAMIWIGLIILFVVVEIATVGLTSIWFAGGALISLILCLCGVGLGWQIGVFFVVSLVLVAFTRPWAVKYLKPHLIRTNYEQAIGENVCLTETVDNQRGTGTAVYKGQEWTARASEDGKRYEAGTIVKVKEIRGVTMYVTESGLMPQVPTPPQTEQEAEMKLGMVFEGGANRTVFSCGVMDAFLEEGLMPDYLIGVSAGIAYGVSYLSGQKGRNIEVVENYIADKRYMGMRHLFNRNEKAYFNTKFVFEEVPNELIPFDYDAFAAYPGKVEAAVTNIHTGKAEYVEVPRGRNMRDTLVASCSLPILFQPVKLGRHYYLDGGIADSIPYEHALAEGCDRLIVVLTRERGYVKKTEKAVRFTDKLYKKYPKIVESMDSRAERYNECMARLQELEQEGKIFVIAPESTYGVGRTTTDVIKLRRLYDEGYELTEKRMQELRAYLGMKIVFLDAKTIGDDIDLSGYDALGEVVKYGFSTPEEARERTKDADVIVLNKVVINEQSIGEAEHLKLVCVTATGTNNLDKEYLDQRGIAWRNVAGYSTETVAQHTFALLFYLLEKLHYYDEYVKSEKYVGDVSFTHFDNVFHELSGKTWGVIGLGAIGRRVADIAGMFGCRVLYYSTSGKHDQPGYERVDFDTLLAESDIVSVHAPLDANTEGLMNAGAFAKMKKSAIFLNLGRGPIVVEKDLAEALKSGTIAAAGLDVLSAEPMRADNPLREIKDSDKLMITPHIAWASIEARTRLMKIIEGQIREFFHLMPGFVTHYLFGEEIYHQLKCNSQKKNLFYNRSAYAFGLQGPDLFFYYLPSYALHRHNLGALAHTTEPRAFFHGLLESYGRLSSAADRGIAEAYISGFLGHYLLDTTCHPYIYAMTHYHDKKEKSYFSRHAYLETEIDTELLARKRHKTPCEFHAADTIQLTFAQKRVIAGLLYDAYHYAFPELSIHRSTMWMGIISLPLGMRILHDETGQKKVLFRFMEKHFLGYPLFSPLIPSDTLFFRTDPFNLRHASWKNPWDATRVSTESFFDLYEKSSARCLTMIRKLHTLLHTEPKSELQKQLTLEFLKEYGNLSFHSGLDARIPSMANLAQSVERKAFSVAIDAALKHLNKDREKGLLQIVDLAEKFMGDNFRKEAYDGARKMIQDPDNKWMHYVNRLLDETDPHVAKMTALNLGYQAAFVGTKTIRKMREVHNCNIPWLILMDPTSACNLRCTGCWAAEYGHKLNLTFDELDNIVTQGKELGIYFYMMTGGEPLVRKDDIIKLCEKHNECAFHCYTNGTLVDQAFCDEMKRVGNLSLSISLEGFEEANDFRRGEGVFDKVLHAMDLLHENGLIFGNSVCYTSKNMDAVTSDEFFDLLIEHGSRFAWYFHLMPVGMKASPELMPTREQREYIYHRIREVRGFTGGKEIFVMDFQNDGEYVGGCIAGGRNYCHINPKGDVEPCVFIHYSGANIREKSLLECLQQPLFMAYRDGQPFNENMLRPCPMLENPELLQKMVHESGAHSTDVEEAEPVEHLCGKCMEYACQWKETADKLWAEHPYQQKGYTNFKKKMVLVIIGIIVYTFRDSAGPILEQLEKTTPAVIAGICAMTVVYHCVEGVITTLLAKQYNREFTLGMGITNAFLCSFYRVATLGSGAGVAAIVYLGEHGIEYSKSFGMYMLQYAFHKISIAFFSMILFALNWNYMRVHFGEYMWLLLAGYLVTLIITVVLILFSCSRQFHRMLLWVVDFFNGKTKGRFDPQAAMLHDQCQMLEDASRQLMGEKRLVAGAVGLNLIKFAFWYSIPYLIFLGQGEITLPQTMAVTSLSVMLAAVIPSPAGIGSTEFVFTALFSGIVGTGLAGSASLLYRFGTFVFPFLVGAVVVIIRRIYLKKTGQAKRMASALFSIADANEFRFARFYIVCEAVMLGTLKSPLIVCGVSDTSRGLSKRGKTRNWIMDIKSGREEILAFCSNEYPMHCFYLELYCILHFIVTGNLFSALCASLILRFFMKIKLYFDKGNLGRLAVAMIFAAVLFWKIGFSVWALPVFGACYFLFKSLEVELSEKIPWVWTGLMIGASSIFTAYHVQYLLLDAELRAKITQPKMLLNILCCLVVFLAVQVFTNNTGLTCMISHIFLVSLAGINYFVYLFRGNEFIFSDLKSIQTGLSVAGNYEFVMDDRAGYVILISTLYVALIRKLHVSFKKRVPMAIICISLAVLSGVYIGHKTEYIVTETWEQKGSYRNGYILNFVLSIRDCFIAAPGGYSSEAVKALEEQYSGGDSGGKKQGEKDAASAYADVAADPGEKPTIIVVMSESYADLSVVGDFSTNIDVAPYFHSLKENAIHGYALSSVFGAKTPNSEWEFMTGNSMAFLPSGSVVYQQYISKTPTSIVSNLKNDGYTCVAMHPYYETGWSRNAVYPDLGFDETHFIDDFEQTKLLREYITDRELYEKIIDRYESRAANEDLFIMSISMQNHGGYTEKYDNFDEKVRLLGLNYPDVNQYLSLVHESDSALEYLISYFQNVDDPVEIVFFGDHQPSLSSSFYPNLNGKGLSGLTEDELEDLYTIPFFIWTNYESTEVELPVTSINYLSTLALERAGIELPAYNQFLADMMETIPAINSRGYYSKSAGGFLHIEEATGEEADWIRNYNILQYNNMFDKKEKSEVFFPYLKMERVTLGKTGITVNKNGFGALPIQRISTEDAVKLARKAYDAGITFFDTARFYTDSEEKLGEAFEGMREKVYIATKTAAANADEFWEQLGISLHNLRTDYIDIYQFHNPSFCPKPGDGTGLYEAMLEAKAQGKIRHIGITNHRLAVADEAIESGLYETLQFPFCYLATEKDIELVEKCKQAGMGFIAMKALSGGLINNSAAAYAFEAQYENVLPIWGVQRERELDEFISYIEHPPVMTEEIAAVIEHDRKELSGEFCRGCGYCMPCPAGIEINNCARMSLMLRRAPSEAQLTPEMQAKMKKIEGCLHCNKCKSKCPYGLDTPALLAKNYEDYKRVLAGEVSVKMKKYETVIFDLDGTLLYTLEDLTKATNYALRRMNMPERTLDDVRRFVGNGVARLIELAVPEGTAPEVFEQTLAIFREYYDIHCNDNTKAYDGVIDLLRELKADGYALAIVSNKPDSAVKELAEIYFEGIVKVAIGESAGVAKKPAPDTVYAALKELGMPKEGAVYVGDSEVDVMTAKNSGLPCISVLWGFREEAFLKEHGADHFVREPEEIRDFLNAMNRRSVKHTLTMTCLMLVLLASLLLGATSIFSIRNTTNMALTEYESAMDSGYNTEIKSEVQTVIAVLQAEYDKSQAGELTEEEAKAEAKEIVRAMRYRDDGSGYFWIDDTDYNLVMHPILAEQEGNNRYDLEDQNGVMIIQEIMKVCNSADGGGFNEFYFTKADGVTVAPKVAYSELFAPWGWAVSTGNYVDDMQAEMTGVEGRINQKFEVLCIVIVIMMAVMLVMAFVWARIYAAKLCKPLVEIQGLASRLSDGDLTTTVNVREKNELGDTAEALNAAQKQIVSLIGSISTASTDLRNALQSFTGNFSSMQESIGNVAVAVNEIAENSTTQAGSTTEASNGIMTIAEGIEKISSEMEELVGNANQMQEYSNKSLAKLRELIDTNNKTEADIESMYTQTESTNASVNKISKAATLISEIADQTNLLSLNASIEAARAGEAGRGFAVVAEEIGSLATQSADTAHEINDIIGELTENSEKSMGIMVQMNDASKQQVEALNHTSEMFLDMQKALEACTNSIRVVTDMIRTANEEREKVTQSIEVLTHLATDNAASTEETSSMTTELEGTVERSSGMIEKLEGDMKVLADSMEHFRLMKLLEPIKVGNIEFKNRIMFPPLTTGYEEKDGSIGEQSFRFYERLAKGGVGYIVIGDVAPLSTFSPTPKLYSPQQAEGFQRLADACHKYGAKLGIQLFHPDYNVAALNEMFHQGKMQEARAKLHHDMQHFVNEVTAEELDEIIKHMENCAVLAHKAGVDCIEVHGDRLVGSLCSPILNHRTDEYGGDLANRTRFALTLVRRLKAIVPDMVIDYKLPIVTPLGDNGFRGKGGLPLDEACIFAKELEAAGVDTLHVAQANHTGNMGDTIPAMGTQPYGFMVSYSKKIKELVSIPVSVVGRIVTPEAAEAVITNGSADIVALGRSLLTDPDFANKCADGHCCDVRTCMMCNKGCTDNIQNRAFLSCVLNAENGYETSRQITPAVTAKRIAIIGAGIAGLEAARVAALRGHQVTIFEKSLQIGGQLLIASVPPRKEEMMRSINYYLNVLPELSVTFRLGQEFTGKDYDSFDEVIVATGATNAIIPVPGKDLPTVTSAWDILAKKEIVFGNVSVIGGGLVGVETAEYLAARGCNVTIIEMMDQIAKEESSTILPTLMSELEHSNVQILTSAKLSEINDHAVIVEKTENEKTSVLEIRSDFVVMAVGARKNLPDLSACPLPLHYIGDCAGERPSNIDHAIKSAYDAACEIMTKQVEITNRSGHVLRGIVNIPDEGSRFPAIINVHGFTGNKSGYKNIYTHTARFLAENGFASVRFDLYGNGESDGEFEDMTFTGILHDIEDIINWTKQQDFANPDKIILSGQSMGGYAAATAAPIVNPHALILMCPGAGMWFGCKDRAEAMEAQGITKADIEGLCFPTSFNHDLYQYEPFSSAAGYTGAVLLIRGTADDLVDDATCHRYEALYNGKCSYKTIEGANHNFASGSARAELDRLILEFLTPLKMKETRPFSMKDKIGYTLGDLGCCCTEQFRAMYLAIFYTLVLKVNPVHVGILMLITKLWDAINDPLIGALVDSHQNKGKGKFIPWIKFFAFPTAVLCILGFVNVSNFAYGARLAYMFITYVVYEIMYTCVSVPFGSLSSVMTDDVNQRTDLSRFRSLGGTIFMTVIVIAGPLFLYKDNQPVPSHFLIMAAICAVIGFICLMFTSHWCKERIITEPVAKEKEKLNYLDVLKAISKNKALLGVMLSSFIGIVGAGMVNGLNTYLFRDYFGNVAIMAVSGMLSVIWSLIAFIGTKFVAKKFGKKEWIMYSATFSVVVYAILFFFPLENPMLFIIINGICYLGVSGFQVLVWALVNDAIDYQELQTGKRNEGIVYSAYTFFRKLANAVSGSMSSFALAIAGFNVNEAVQSEAFSGRLWKTYTGLYVAGYLLAVLVLKFVYPLTKEKTAEMLQNLSDKRNAANAEMEYIKIEDSGQRSFGQKKNHTIIFVTGGMGYLRQENEKAVCTMEDLIFIKPGNKVKIEYRKNKYPLELYVLYVGTELLQSLSDENTRLDEAFDIVPFQVKTVHSESESAMLIKNISKKLYSMLKESPKFAHTLYEKSLLTMLLVLALRSSVKEDVQLKLNKKKHVVMDDIFIYIREHLTEDISLERLENEFYVSRYHIVREFKKMTGETPHSYIVKSRLDLCRHYIEQGKSIREVYELGGFGGYNHFFRAFKKEYGVTPMQYYKNLQIDRNERMKATGIVRRIDDLGRIVVPKEIRRTLRIREGDPLEIFTDREGEIILKKYSPIGELSQFAGEYAESLAHTTGYLVLITDGDHVVAASGSGKRDFEGKPISGQLEEIIGERKSLVASDDEKTFVKLTADDAGEYRQQAISTIICEGDAIGAVILCSREEREKMGETESKLVAAAAGFLGRQMEQMSEKPDVTMGEMTKTNGTSGRKVPKKIIWTIGAVAVAAIILLIGICSGAFLSRSNRILLAARNTIKDLPTVVENRNVADIIASGKYTIGVKGAVRGKDFDGTFKYKDTQLQAGGTISLFGRENLDFLANLDDEQLCASIPMLTDNLLVYNYKEEKDGYIVDLLGADGVASIDAALRELTSKEEQNRAAQEILSVIYDEYKTLDIKKAEKEEFIVDGSARKCNGYEFTVTEDELLQVMDGVKEVYDAYYGGAADTLKLKLGDDFSQLRDRACSMGDINVKVYVYQNKLAAVVAEAENSDTAFRLLFKGGEYRMQNLELLAEDLDGEHSILELTGKAAGEEGGYEFLIDNGEHDINLVISISGEVQFEKMSGDRIDVGNMSEADLRKFILRTVGTIITSHIRMDLSYNEDKEKRRRLTVEKTIRCCGQGENMEKYGFGVDVGGTSCKLGLFTDSGKLMEKWEIPTDTSEQGEHIIEHVAASLERRQRERGLADEQIIGVGIDTPGIAGRDGVVRGAVNLGWEAYPVQEQLKMRLQKKVCVCNDANAAALGELWQGGGRGYRDMVMVTLGTGVGGAVILNGKVLAGAHGIAGEIGHMTVFHKEIERCACGKYGCVEQYASAKGLIRITRQLLEKKDPYTILVDTPELSAKQILDAAKRGDRLALDAVEVLGKALGSALAAVAEVIDPEVFVIGGGIAGAGEIILRIVQKYYRPDVLPAGADIPFELARLGNDAGMYGSMKLLLDSSDEKMAYILYGERENDKFQMQPAAAFFGVKSEYFFRAASDIEFCVFPRLDSSRGVSDKPQTMSGLSGAPSGTASQTIMFDAAWLEIPDFAIRMSLPAVFWNFVFSDISIIKHRPFRFQKSGSYFWERVHAGMKFIHIADVHLGVKPDQGKPWSELRARQIWDSFADVIGVAKREKPEFLFVTGDLFHAQPLKKEVREVSRLFGEIPDTQVLLIAGNHDYLREKSYYLSDLWPDNVTVFKKEEAEAVDFPKYNTTIYGLSYWHREIHDRLYDELRPVNRSRCNILLAHGGDERHIPFSAERILQNGFDYIAAGHIHRSGWLMPHKAVMAGSLEPTDCNDTGPHGYWMGTLGAAGADVYFYPLRHCEYCHEMYQADRNTTDRMLWDWAKELLEQRPEYQYFRLYIKGKKDPEYSFDVQEIGKLDRIVDITDQTVPDYDYEKLLEEHADSILGEYIRSMRKKEPGVCTAKALEYGVNALLGYDCMQIDRAAIFRFGKLADRTVDFAPGINIVYGKNEAGKTTLHAFLTAMLFGLEKGRGRAKGTEGYLRYEPWHAPSYYSGALQFSVGGRPFYLERNFYHKEPRARLCNLADGEELSVAYGDLGMLLGGVTREAYENTCDIPQCRAVTGAELTGLLAEYLSDMSDGGNAGIRVTRAVEKLEQKKRSLQSQIKSEQEKREQQLQQLTVERRMLEEDCGRLREQIEKAAADMRAYARMHPQVRDGQRPEDARTAENAGTASDRERRADGNGFPVRSLFLGLAAAVGLAGNAWWYHRAGYAPELFAAAEGVLAILLGIGVAGILRHRSAGQARAGENGKETTEAPESAAAEDAVRIRLAESEKQSRRLLAGLEETLAEKETRRCNLAEQLEVCSGAGARERELQLELDAVEMAKNEIIRLSREYGDERRDEINSVVSRYVSAITEGKYDLAEVDETGKLRVQTEGREVLPEALSRGTLEQFYFAFRMAVGSIVTQEEPLPLLLDETFAMYDDDRLRQTLRLLAANGSQTILFTCQRREQKLLEELGIAYHMIELMAAKKKKKKYRGFWIFVKVQFVLSLLVLGGLGYYVLGGYASEVSSIHKEADSLVRNSTEETFRRYRTSVVYAADGSVISKLNDQGASYYLKRDEIPQSVIDAVVCMEDQRFYQHRGVDFRALVRAAKSLIENRKITQGGSTITMQLARNVFLTQEKTWQRKVEEIFIAQNLEKKYTKDQILEFYLNNIYYGNGYYGIGAAGRGYFDSGVDELDLSQIAFLCAIPNNPTVYDPVTHMDHAIERRDRILGKMRDDGKITQMAYAAAVVENITLKRPEAMEKNNYVETYAYYCATRALMEQAGFVFQYQFATEDEREAYERAYSESYSDCQKRLYTEGYQIYTSFDLQLQEELQVAVDDTLSGFTEKNDEGVYDLQGAAVCIDNDNGYVRAMVGGREQDFDGYTLNRAYQSYRQPGSAIKPLTVYTPSFERNYTPESIVVDEPVEDGPKNANGTYLGNVTVRTAVEKSINTIAWKLYEELTPQVGLSYLENMHFSRLDAADYVPATALGGFTNGVSPLEMAAGYAALANDGMYREPTCIMRITDDTGAEVYLAAQEGQEVYRQNAARMMTDVLKGVFINGTGRGLGLSDMPCAGKTGTTNDHKDGWLVGYTRYYTTSVWVGYDMPKEMDSLMGNTYPGKIWQTFMEQAHEGLEWLDFLPYTQIPDASSGEMEAEDAATDEGNAQGETPAENGDTPQENVTDTPDTPQGSATDVPSSSQENGQGISDTPDATQEQPSDAPQQNTTGTSQENASDVSQENAAQSSGENAAQSSGENASDTPQETAPGAPMKKYAFGVDVGGTTCKIGFFETDGKLIDKWEIKTNKENGGASILPDVAQAIEGKLTEKGISRDDVQGIGVGVPGPVKNDGVVHRCVNVGWGVVNVEKELGDLTGLKVKAGNDANVAALGEMWQGAAKGCRDVIMVTLGTGVGGGIIVDGKVVAGFDGAGGEIGHITVNAHEKEQCNCGQYGCLEQYASATGVVRVAKRTLEKTSEDTALRNHADLTAKDVFDEAKAGDKVALEVVDEVCGILGAALSNIACVVNPEVIVIGGGVSKAGDILTDAVKKHFVATSFHACANTKFVLAGLGNDAGMYGCVEMLLDMNNFFATPEGGWGDGSVHLTTVGIAIVIAVIALLLIVAAIVRHKNATHKSALTTKQLVYSAVAIALAVVCSMIKLFDMPMGGSVTLLSMLFIVLIAYWYGPYVGIMTAVAYGLVQFVLEPIFYTIPQMLLDYPLAFGALGLAGFFNKKKWGLQIGYIAGVIGRFVFATISGVVFFAAYAPEGMSPLAYSAGYQASYLVPEAIITLIIICIPPVSHALAEVRKRAVEAMFSLKAPKNAAAAPATSTSRLDLHPVAHIADCLLDYQKQLSTSEVHSLDELQSITQAFQLVLDENAALREKLDSFHELFGDVDRASGEFASVKSDIASSVGLAQQRVDGLKDSSKEVQERFLEMQNTFSDFQVSVQKIKDCMAQIISIANQTNMLALNASIEAARAGEQGKGFAVVAEEVKNLASEIKSLVSTVDISIGDVEQGTANLNTSISTSQDALNQSMENVDSTYEVFDQITTAAGGADTVHQQITTAMSAAEQKLDEVSQSFSLEERQFDAVMEHINHANDLGTTKSSLFEDMTNLLTQIAPLTEELEKNTIVLDNSKMKQYFGMSQTGNLKEAAQGVHAPGLLILMSNADQFEAHVTELESLFPGVPSIGCIGMSYSTRVVEKGVGLVAFYDNVTAVANVLEQASTMPVKYIERMEQDLKNVHASSKDTVCIDLCTGNDACVLTTIHSILGKAGIPLVGGTGDGGKVSVNGTVYEDADVYAFVKNNGGKVAVYKENLYKPMPGYRFIASNTDRSRYYVGELNGKSSKQAYMDALHISESNIINQTFHNPLGKMNGQDICIISLKEVSGNGLCCYRQVNDSDVLVLLEEQDYNEILDETLQRIRRDFNHISGVFSINCVFRYLLFSQEHHMEDYLKTMSTLGEHAGLIGFGEHYNQQFVNQTMTCVVFEMFLLLFPVPFNYLLFKYFDNQIICFSKYMSVLFDCQGIFWKRFAKIALMRMLEKMRPIIAEQLNVQESEIKENTKLKEDLGADSLDLFELVMALEEEFGVEIPSEDLESIVTVGDVITYLKNRGVTAMETRVSRLLGTKYPVIQGGMAWVAEYHLAAAVSNAGGLGIIGAASAPPEVVREQIREVKARTDRPFGVNVMLLNPNAPEVAKIVIEEKVPVVTTGAGSPAKFMEAWKQAGVVVIPVVASVAMAKMMERAGADAVIAEGMESGGHIGAQTTMTLVPQVADAVSVPVIAAGGIADGRGIAASFMLGAEGVQMGTRFVVAKESIVHENYKERIVKARDIDSEVTGMSTGHPIRVLRNAMSREYLKLEKEGAGFEELEQLTLGSLRKAVMDGDVVHGSLMAGQCAGLVKKEQTCQEMIEELMAQTAGLLGDGDFWEKKSVFLGRTSDKGEMGKTAFLFPGQGAQYIGMGRDFYEQIPVSRDVFAAASEASGLDIAALCFEENEKINITEYTQIGMLTVEAAILQALLAEGRTPDVAAGLSLGEYGALLASGVMEQRDAFALVRKRGIYMQEAVPAGGAMAAVLGLDAEKIEKICGQTAGTVSIANYNCPGQIVITGEEAAVAAAGEQCKESGAKRVVPLKVSGPFHSPMLKEAGEKLGEALAAVTLREIKLPYLANVTADYVREAEAVKPLLKQQVCAPVRWQQSVERLLADGVDTFVEIGPGHTLSGFMKKILKQAEVPADTVQVYNVETMDDFKEYMSKMLEGKVALVTGAGRGIGAAIAETLAREGAFVVVNYRGSGQAAQELAEKIGGVAMQCDVADFEACENMIKTMIETYGHLDILVNNAGITRDGLLMKMSEADFEAVLSTNLKGTFHTIRHASRYFLKQRYGRIVNISSVSGVMGNAGQANYSASKAGVIGLTKSVARELASRGITCNAVAPGFIETDMTDAMTESAKEAVQKQIPLGRCGNTKDVAELVTFLASDKAAYITGQVISVDGGMCMMRRRVVVTGMGVITPIGNSVEEFWNAVREEKTGFGEITHFDASGYKCHLAAEVKNFDGKNYMDPKAAKRMELFCQYAVAATKEAIADAGLEMEKEDPYLVGTAIGSGVGSLQAIEREYKKLLEKGPGRVNPLLVPMMISNMAAGNVSIQFGFKGKSINDVTACATGTNTIGEAFRSIQYGEADVMIAGGTEGSICPIGIAGFTALTALSSETDPKRCSLPFDKERSGFVMGEGAGIVVLEELEHAKRRGAKIYAEVAGYGCSSDAYHITSPAEDGAGAARAMENAMKDAGVKPDGIPYINAHGTATHLNDLFETRAIRLAFGEHATKLKINSTKSMIGHLLGAAGAVEFVTCVKEMQENYVHATVGYQTPDEELDLDYCREAVAMEVPYALSNSLGFGGHNASLLLKRYGGEVMELDIGQIMEILPHRQPFLLIDAVEELEPGKRAVARKCVSYNEPYFGGHFPGEPVMPGVLIVEALAQTGAVAILSMEENRGKTAYFAEINRARFKKKVVPGDVLTLTTEIIRQKGPIGIGSATASVRGEVVCTAELTFAIGSKEEMAALFQKRKKEPAEKTPVEAAQALQETIVCPACGREINKKEAEKNLYVCYECGSYFRVRTRNRIRMVADAGTFTPWFEDLAEANPLEFPGYEDKVKAAKEKTGLHEAVTIGHCKIYGEDAVLGICDARFLMSSMGHVMGEKIACAVERATEEGLPVILFCCSGGARMQEGIVSLMQMAKTSAALKRHSEAGLLYIPVLTDPTTGGVTASFAMLGDIILAEPGALIGFAGPRVIEQTIGEKLPEGFQRAQFQLEHGFVDRIVERKELKLTLYRILKLHHKKEGYANFDPVREADCLEATELMKERATKAKALSAWEKVKAARKVDRLASVDYIEQIFDEFMELHGDRQFRDDPAIVGGVAYLDGQPVTVIGVHKGKDLKECMHRNYGMPSPEGYRKALRLMKQAEKFKRPVITFVNTSGAFCGMEAEERGQGEAIARNLYEMSGLKVPVLCIMIGEGGSGGALALSVGNEVWMLENATYSILSPEGFASILWKDGRRAKEASGVMKITAQDLKALGVIEEIIPEYGMADQPALISISRYMKRHIKTFLKKQNGKTGDQLAAERYQRFRVFMKVKIVGTGSAVPEKCVTNDDLSQWMDTSDEWIRSRTGIETRHLAVRETTTEMAVEAAKRALASAHMDAEELDLIIAATITPDRLLPNLACEVQSALGACRAVAFDVSAACSGFLYAMDIARHYLEAGGSRRALVIGAETLSRIMDWSDRSTCVLFGDGAGAAVLEADEAEEHAGILSTVLGTDGAGGMVLRCDNRRNHNPYVKGDTALSYVSMNGQEVYKFAVRTVPKVIAGAVEEAGLSMDEIDFFLLHQANLRIIEAVAKRLHQPMEKFPTNLQKYGNISSASVPILLDNVNNHGMIGEGSKIVLAGFGAGLTWGAAVLRWQAVMTTDETLNELLVRLFKDIMEIEARCLVNEEFKDISYNDFHIIEAIGLKEPKSMTAVAKLMDVTTGTLTKAMDGLTEKGYAVRERSKQDKRVVWVYLTDKGKAAYAHHEEFHRKMIANIKGQLNEQETPILIYTLAKLVDYFQEEYGLEEEMSRGALGKNNWALFLMLLAGIMLGGFIGNAAAGVSGLSWLNYGQSFGFASPIVLDLGILVITFGLSIKITIASIIGVLIAIIIYRLIMGYVDEVLAKVKEKNASEPEFLQAVEEVLESLRPVIEANEELYKKNAILERITEPDRQVMFRVPWVDDNGQVQVNRGFRVQFNNAIGPYKGGLRLHPSVNLSIIKFLGFEQVFKNSLTTLPIGGGKGGSDFDPKGKSDREIMAFCQSFMTELYKYIGADTDVPAGDIGTGAREIGFLFGQYKRIRGLYEGVLTGKGLTYGGSLARTQATGYGLLYLTNALLKDHGIDIAGKTCAVSGSGNVAIYAIEKAHQLGAKVVTCSDSTGWIYDPEGIDVALLKEVKEVKRARLTEYAAARPSAEYHAKQNGEHGVWQYKVDLALPCATQNELDIEDAKMLVANGVTSVTEGANMPTTLEATKYLQANGVLFVGGKAANAGGVATSALEMSQNSERLSWTFEEVDGKLKGIMETIYANISDAAKRYNATVGGQTDYVAGANIAGFEKVVDAMLAQGVCMPNILPVSDLRNYNEVLKNCQVGEPVFLTKNGRGKFVVMDIEDYEREKAEKKLLMKLQEAEEAVKDESAWMSLDELKKSVGVMKEYIAEDNEEMAVKTIQEIYARIENIQQLPYMGADLAKRVSFRTDYKYVICGNYVVLYKIGKEYVEIYRVVNRHQDITKIFMQENKMGTMPIDKLIISMSLPIMISMLVQALYNIVDSIFVAQISENALTAVSMAFPIQNLMIAVGVGTAVGVNALLARSLGERDFDKVNKIAENAVFLVLLSYLLFLIIGLFFAEPFFRSQTDIEEIVLYGKQYLTVCCCLSFGCFTQLMFERMLQATGKTVYTMITQTTGAVINIILDPILIFGLFGFPKMGITGAAAATVIGQMIAAVLAVVINQTRNKEIQLSLKGFRPDGTIIGQIYAIGVPSIVMQAIGSVMNYGMNRILISFSSTATAVFGVYFKLQSFVFMPAFGLNNGVIPVMAYNYGAGSRERVVKTLRHTVTYAVCIMAVGLLIFQLFPTQLLKMFSASDTMLSLGVPALRIISLSFILAGFGISCSSIFQALGKAVYSMFVSIARQLVALLPVAYFLAQFGNVNLIWWAFPIAELISIIMTILFMFRIFRTIVNKIGEKEMVMNILFFLTPKEDVAHVDEDDTMRQVLEKMEHHGYTAIPLLSREGKYIGTITEGDLLWFLKDRNFPDLKLLEDMPITSIQRRRDNEAVKIDESMEDLFGKVMNQNFVPVVDDKRVFIGIVTRKDILAYLGKKAAAQENGARGMDQAMNSILSATVLIPLIVIVLLIVLLCVGYVKAPPDMAYIISGVKKKSKVVIGKASIRIPFFERLDKLNLRLIPIDVKTSNAVPTADYININVDATVNIKISNDPEKLRLAAENFLNKNTEYIAGVAREVLEGNVREIVGKMKLEEMVSDRQKFANLVKENAEPDLAAMGLDIISFNVQNFVDGNEVIENLGIDNIVKIKKSAAIARAESERDIKVAQAAADKESNDAAVAAQTEIAKKQNELAIKKSELQMEADTKKAMADAAYEIQKEEQRKTIEVTTANADIAKQEREIELKQKEVAVKEQSLEAEIKKQAEADKYAAQQRAEAELYQRQKDAEARQFEAQREAEARKAQAEAERYAKEQEAAGIRAVGEAEASAIQAKGIAEAEAMEKKAEAYAKYNKAAVAEMMIKVLPDIAAKVAEPLGQIDKITIIGGGEGGNGVDQVAGNVPVVMAKVFESMKEATGIDLADIINAESYDAQVNRNINVSGLDSVNLVVKDEKKGAEQPDAQDGATIEMTVEVGVNRRAGTGQSVTAAVFIVMAAGSIAVIPLLAANLDRRALGIAACVLTLVFWVGFIGAICCVGEIVNTPTRAFLLTSDWQLYYVHFAARDYGPAPVTKAGEIVHNYKVLSEEKKGRKWRREYLGSEEFRSMAQQYLEGVRTDTMGCVIEHLQTPSIRSEGIDGSVLRYWDDTRKKWATIRLLRTNTGYEKICRTVKLRQELGRMSFDFRWNASGNSDQKCGISNQPVFASPMIRVFPSFEHSTGVSATRRQFMDNRLTDLSHPAVAAQSRNKTAIAGTCTMNTVLAAAYIAEVLKGVRSLPSYLIFLLLCLLPCVTSILAYTKQKDTSSVRYLCGGGFALLYAYVMFTSSTDLTFCYVIVMLLILLVYADKKLVSLLCTYALVINILVLVFRAVTQGFTAAQITNAEIIIACIILSYIFVLMSVTKIAQINDANIKKADSDRSQSDDLLQLTLKVAGDMAGNIDQVSHSTSQLRDSIAGTQTAMEDLTSGTSETAAAIQVQQQQTENIDQQVQNVSSVTAELLSSTAETSANLTASKDVMKNLVQQVQVSEASSTRVADSMEELKEYADKMQSIVALISSVASQTSLLALNASIEAARAGEAGRGFAVVAEEISSLAGQTNGATGDINQLIEHISQSISSVTDSVTELFDSNRHQSEYITSAAGYFDLIEKNTASITSGMSELKQGVDAVSDSNSQIIQSIENVSALTQEVTASAGAPLAGCRTNLQSVDDIALIMQQLQENANELQKNTQMNELKPKLFDVLKDYSKEQAMRDVISGIIVAIIALPLSIALAIASGVGPEQGLYTAIIAGFFISFFGGSRVQIGGPTAAFVVIIYGIVTDYGTAGLTVATILAGIFLIVMGICHFGSLIKYIPYTITTGFTCGIAVTLFVGQLKDFFGLSIASVPSGFVDKVIAYATNISTINWTATAVGAAAIVIMLLWPKVTDKIPGSLIAIIVTTAVVYFADLPVNTIGSVYGELSSSFPTPHVPALSMKLVQEMLSPAFTIALLAGIESLLSAVVSDGMIGDTHKSNAELVGQGLGNIFSGIFGGIPATGAIARTAANVRNGGRTPVAGIVHCITLTIILLVLMPLAALIPMTTLAAVLLIVAANMADWTSFFRLCKTAPKSDVIVLVATFLLTVFFDLVIAIEVGVVLAAMLFMKRMAETADVTAWKYLDEPDVTPGEAEKLRDIPHTIRVFEISGPLFFAAADQILQINSDKATRVIVIRMRSVPAIDASAMKSLRELADRAKKKKITLVFSHVNEQPMSVMVKDGFTEYVGAQNFHANIVEALDYAENLVKMAESGNSYQKIYEIVKQIPKGCVASYGQVAALAGNPRWARVVGYALHVNPDPAHIPCYRVVNREGRLSDAFAFGGVNEQKLLLEAEGVEVTDGYVDMELYQWKKLRIMRKKELALQVIERLKKEYPDTGCSLDYDDAWKLLVSVRLAAQCTDARVNVVVQDLYREFPDVDALADADVEEIERVVKPCGLGHSKARDISACMKMLKEKYQGKVPEDFDALLELPGVGRKSANLVMGDVFGQPAIVTDTHCIRLANRIGLVDGIREPKKVEMALWKLIPPEESNDFCHRLVDHGRAVCTARTAPYCDRCCLNDICKKAGIMNIAAKYGKSYFMPPEVTYDWVKKDSIEKPPIWCSVDLRDGNQALIEPMGLEEKLEFFRMLVDIGFKEIEVGFPAASDTEYNFMRALIERDMIPKDVTVQVLTQAREHIIRKTFEAVKGAPHAVIHLYNSTSVAQREQVFKKSKEEVRQLAVDGAELLKTLAAETDGNFTFEYSPESFPGTEVDYAVEVCNAVLDVWKPDAEHKAIINIPTTVQIAMPHVFACQIEYIHKHLKYRDNVVLSVHPHNDRGCGISDAEFGILAGADRVEGTLFGNGERTGNVDIVTLAMNMVCHGVDPKLDFSNISEIREKYERFTGMRVYERTPYAGDLVFTAFSGSHQDAISKGMAWREAGKSGDRWDVPYLPLDPKDVGREYESDVIRINSQSGKGGVAFVLKQNFGMDLPDKMKEEVGYLVKGVSDSRHQELSPEAIYRIFEEHYVNLCDVFQISECHFEQKDGITSRLVIEHNKERRTIETTGNGRLDAVSNAIKMYFGISYELAVYEEHAISEGSSSKAAAYVEIICKGKNYWGVGIDEDIITSSIAALVSAANKMLKSENIVEGREERIVDIMNYIQNHYADVTLDVLADQFNLSKPYLSKYIKEKSGMTFQDAVKKARMKKARTMLKETNQTVESIAAYVGYENVEHFNRLFKKAYEMTPVQFRRKYQMEEFKQLEIYLFPIVMLLAIGMNNWKREERTQGDRIFGFLPFLIICMMGSDVTYHALQLYVHRFTVLYAGYLVYCFFLTAVPYAWLLYVNGKLSARHNRRWTAAVCHVMTGIAIVAVLLTVIIPWSLSTEGWGAHAVSYSLNHGSLPAKLVSIVLYLMGLILAATAYPKEVTKEGQKETRYLLEAGVFSLVGGMVQSFAEDWHTGGPFVALAVLFIYLNAQNRQITTDGLTGLNNRREFDAHLQRKIELCPEHEWGLLMIDVDDFKRINDELGHAVGDEALWHTADILRGVFGKDPVFLARYGGDEFAVLGDWFGQEQIEEAIARIQEGIDRFNKEGQLPLQLSMSIGYAFWHEAGRRGENLIQQADERMYEEKQKKKRMRAMSTAAFLQINFIPAIALLMMRHNTRQTLSFSWRTRVLRTEMLLFVLLLLCRTAILCNLGKGGFGPRILLKGLGVWYAFGLLACAYLCFLYVLDVAQDGNGQRGIKCWILAIPALIGSAVLLSNPWTKAVYFINMVNYYKKGPASYLIPAVGMLYLVVAFLLAAFGALRAGSAQRRGELGKLAAAFLFPAAGILVEKIFSMDAAWAFTVAALLWVYLGIQKGQVTQDGLTGLNNRRRLDQYMWELDERSGERETCCYLLMDVNKFKKVNDTYGHVTGDEVLRLVAEQLKRTFGNMQAFLARYGGDEFVVIVKGKTQDEMDVIIHQTQENVNAIAWGADTPWQLSISIGCAMRGEQGKQKSHELLALADERMYRQKKGIQDRMKDGEVRDFGRRDKIGYMFGDFGNDFTFIFASSFLMVFYTKVLGISGGMVGTLFLVARFVDAFTDVTMGRIVDAAPPARDGKFRCWIRRMCGPVALSSFLMYQTAMAQASMPWKIVYMYVTYLLWGSIFYTSINIPYGSMASAITTEASERTALSTSRSIGATLAGLVIGIVTPLFLYTTDADGNQVVRGGGTFTVVAGIFSILALLCYLVCYRMTTERVAVERDVDAESVSFAATLGAIARSRALLGMIGAAVFLLLSQLLISTMNNYIYPDYFGDARGISLFTLLSTLVILLVVAPLGVPVSRRFGKKEASVAGMLFSGVVFAVMYVLKLQNMWLFLWLGAIGYLGLGFFNTVIWANITDVIDDQEVQTGHRDDGTVYAVYSFARKVGQALAGGIGGWALQVIGYEPAAAAQTDVVRRGLYTTATLVPAIGFFVVAAILWFVYPLDKRRVEKNVEELKKKHLPAEHMKANVIEGCISCGLCASVCPEVFRMNDENVSEVYHQPTPEQEDATQEAADGCPVSVIEIEMANSKRHKLVCCLMAMALLLSFFYVVPDPAGKAERGDATACVADGQAALTGEMRHEGSWQNMMSAQTLLEARDANPDACTDTFTMIHSVLDEVVMREQAGMRSLLSKLLAVVVWVMLLVCVVCRILSRRYGCRMIYHWENIYYIHQTDGKKGDCFLNYLHIMNYKNQISDRVKILLIDEDESIFYLIRRVLLRENYRLYTSTSGRSGMEMSTSICPDLILMDTQLSDMDGIGLIQWFREWTDCPILVVSGQTGYMDKVNALYAGADDYIVKPFHEQELAARIYTALRRRIPGGQGSFYQAGDLKIDFSRRQVSLAGEEIHFSPVEYRILECLALNSGTVVTYQMLLEKIWGPYASSGSRILRVNMTNIRKKIEKIPMDPTYITTIPRVGYRMLESQTASVVMKKGKKQAKRRNANVTMAFGIREKIVLCFLVPVLFMIVLGIISYRKAADGMSSSYRDSTQQTIEMALQNIDTSNSFISAEALKYVVDSDLGKYFVGIYDNDPTSKRTLIDQVKTRILASQVGNSYISNIYIIPSGDLQMISTKNKAQKGIYQEYMDEMAVDGKLEQWDDHHNALDEYLSIDSSRYIMVYQATAQNGKAVIVIDIKAEAVTEFMQGLNLGDGSIVGFVTAGGRELAVKRNAGDEQGTPVEGETIFADKDFYLQASETDGVRQVQYNGTDYLFFHSKSEDTGATMCALVPLKVITGQAESIKQITIAGVLISSIIALLIGTAVTSGIRKNMKRISGSLEVVAEGNLATTVSVKGRDEFRGLAAAANDMIAHNKQLVQKVSQATDKLAASAGEVTNASGIIQEYSQDIANAIGEINEGMERQSTHAQECVSKTGTLSEEIQEVNRVAREVETLVSEAEEMIRKGMDRIEQLGQRANETTAVTAKVEESIEDLKRESETINQFVSVITDISEQTNLLSLNASIEAARAGEAGRGFAVVAEEIRKLADNSAEAAGEIRNNVENISAQTGVSVESAKQAGEMVAQQTEAVREVIGVFQDMSDAMDKLFDGLKEILAGTERADKEREDTLEAVHNISSIIEETAASAEVVKKVAASLEQNVENLNGTAESLGDNMTGLKTEIAVFKTEMETYNDQLFPPAFLVNYTKEPAGRQRVLTYSLFRFLSCVAEEQPDLAQFLADQVSCPSAEDSFEILEDYLSADDYFSPSIAADGFEPFYLYAAIVLTAGVPFGTTTPVIDSLIEDHAPEAASLPYADGNLPLDALLVDCRNFYAALCLCLMHHTDALAVLLPQFLNAYRPEYHFSCESFVLYDFMDEYFEQHDCLHHPSFVQLTDTLVAATLNYYNTDFGTLLETEIAQNLSGTGSRFAGLKRYGSVRLPAIADTDKACHMLANLFRYAALYELRSHLFDFHLDEDRLITLDNWQTELHWHYVQYANVYQLALDSFQSAVLSRELLHRQFLLNLSCLNLMPKQNQPKEEKREKGTAQAVIREILSWVIPFVIALAVAMFLKNYIIINADVPTGSMENTIMPGDRLIGNRLAYRSKSPERGDIVIFRYPDNEEELYVKRVIGLPGETVDIRDGYIYIDGADTPLDEDYLKEDWTVATGNYHFEVPEDSYLMLGDNRNDSWDARYWTNPYVREDKILGKAAVIYWPVHDIGKLEMVTLLAKIFIQEKNDQAKIREEYGVLCGVVGILFNVLLFAGKFLAGTISHSIAITADAVNNLSDAGSSIVTLAGFKLAATKPDTEHPFGHGRIEYISGLVVAAAILLMAYELIRDSVGKIVHPEETEFSGLIVVILVLSILVKLYMYFYNHTIGKKLDSAAMQATAIDSLSDTCATTAVLAATLIGHFTGLHIDGWCGVLVGVFILYAGISAAKETLNPLLGQPPAEDFVMQIDRIVMSHPEICGIHDLIVHDYGPGRKMVTLHAEVPADGDILEVHDVIDNVENELREKLGCEATIHMDPIVTSDEHVSELKAAVVSITKGIDDVITIHDFRVVSGPTHSNLIFDVLVPFQFKMSDEELVAAICGRVTECLGDNYYPKIKVDHAYVKNLKFSGLRREVYERDEEGNSTGVLIKRTYDLKSEAQGRMIQVSLPPEAGAKDFAYDQPVTLVDVVIDSVADARGRNRAEASWYLNAADLVPVGTVPGGSGMFQIPIKYIENNLVLNNDKECFAYYEMIPYNYSFLSADQKNQIHDEFRQLVAANKNGRMHFLMIAAETSIRERQERSKQCVVGEHKEAAEYFVDRQTEILVADTLADEAVDDDVEKSEMKNDDRNGSQIDYRFFIGIKLVTRDEELTATRVKELVRDAVIDFVKSVNHELAGDFYSVSNSEMSRYARMEKQLMKRISRRFRFRRMEEKDFGYLMEHLYGQTRVPYYQYHYRLPKERMKEETLVKKYDLLKLSRCLQEEHQRYVKLERQKETVYAAYLSIDTIIGEIAFPSSEILYYSQEALSFPVDVSVNVEIAPNKKALTTVRNKKKEMQDLDNHAYQNSQDTDNTVIDGLQAAVELEDELIASKDAMYKVSYVLRVSASSVDVLEDRVDELMELYSDSNIMRKIKSYSSVWKFEKYLSSVGDLPLPIPVTFVQIAWFAGTFFAILFVFSKIPPLSYCNNVLFEYGVIPGGIAWFMSKKTFDGKRPYSWLKSFFLYFLRPKQTYAGKRVKYGKSKFEDEITIVRCYKYVPDTDMFYGQNFFNLVMSNVKPILLLALAVAGLVLLVQHKTAGLVTLAFTALCAVGLVYNTEGAKDAILSVFNTIIGSGTITGVVPHFMELSGATIRERRKEDHMTQQELADLVGISREHLQRIEAEKKQASDKLLEKISFFLDLYRPDAGLEILLDYCRIRFPSVDVKHILEDVLGIRLKYMIRENHALYGYSAQYLMGDIVVMYSEDEKLGCLLELKGKGCRQFEIFLNAQGRTWFDFFRQVEMEHGVYKRIDIAINDRAGWLDIPYLAEKCRKEEYSTIFRAYRNYQSGELIRAREDDRDQMGNTLYLGSMKSEIYFCIYEKDYEQYVKTGQEIEDADVKNRFEIRLKDDRATHAVEDLLDYEDPAKTAFGIINRYVTFLIPKAGEEDITKWDVDPMWARFIGEEDRQLKLTDAPEPYTLERTLNWIRRQVAPSFKMLHQLAEIRGEADLLDRMIDEAKLSPQHKKLLKQQQTEVKEMLAERFADMGIRVDPDTGEIVEMMNTKKCIFILSKSQFLNVTFFIPDHILEIASNPYVYWQNVTFMRPGIYSFYTFPKMMIRRHKRRIILRDDAIPQSNIATPFNIFCDKLLFRRSEHHRITAIFHRTQGDAESELVTNTIRQILCVRALARQNNKKPRLTTKQDYLLQVADHFLCLFLRQHRQIRHIFIKYHKTGGEPKHTVILARFIISAPFHFFHPLKHVLVKLRNLFLDVIRIRIHLRKIPFQPGKICIFRINYNQLCLRNRAEASWYLNAADLVPVGTVPGGSGTGAGAGKPQDKQPEKKAMLRESRNLKRRWVQGIFAVAFVVGLFWMLAGSPVMVKAGTLEYHASISSSTSGSDITFNCDLDQTIDGQRASYQWQENRGSGWQDISGATGASYTVGKTGRGGYQYRCAVTVVINNSYSLLNEDYKAFLHREGSVPEFQSWWPHLYGHTQNSYLVGIYDAIGIWPANEAARVATEMVFSTEYMSKYSNSNLNYSVDTNLATRNGPKQLIVDCYHFLLQREPSDSEVEYWYGVYVSHNTVQQKIAYFDTSIGNYRYFMTYSGMGYVLNQIAASDECASKMAAAYYYDGNQGVFLYTESDIETRSDTYHVTSDVATIPENAYQVTLQKGTGVQSVSGAGSYTMGQSVTINATLATGYHWKGWTGTYQTTTKRYTFSMPGQDVSMTASAEINHSTLRVDPNGGTWNGSADVQSFSGDYGTTKSIPDPVRPGYTFAGWVKSDGFHGSLNNAVYTFGTDNGVTDVLTASWTAKRYKVILQKGTGIQSVSGAGSYTMGQSVTINATLATGYHWKGWTGTYETDTKQYTFSMPMQDVSMTADAEINHSTLKVDPNGGTWNGSADVQSFTENYGVAKSIPDPVRPGYTFSGWVKSDAFHGSLNNAVYTFGAEDGATMKMKEVWKRTTAFVTAAAISIGMFAGSPVTAKAADEAGIRAFVTRMYEVCLDREPDAAGLDDWSNRLATGQEQGANIAFGFIFSEEFRNLNLCNEHYVDAMYEAFFNREPDAAGKADWLGQLNSGATRGHVMTGFVNSQEFANLCAAYGIDQGSGDWSADNIPVSGSCAICDSGSHEVTPEIQAFAERLYTCCLDREPDVAGLNDWSTALANGAKGSEVASGFIFSQEYKNKDASDTQYVLMLYKTMLGREADTPGVTDWVLHLRNGASREVVYNGFVGSIEFANLCQNAGITVGGAIADNGTTGRQSTGEMVMVYVDTYVDGEYRVTDWYRQVTEGDLVDPKGLYFQSPLPLEGESFIAYEGAKGKVNITSNGYGIMFDMKQIAVLFSVFFLGVITIVSVMASGGRSNREMELADNLPAAVEETVSELMEEKNYDITSENEMIADMVEDLSGKLDSNSDITVNIENIDVAKGLMSIKVVASYQHPNGKEGSVSCERTVVFNKLQDDPAELCQVRFLVDARTYKTCNVWPGDTISAPSEPMVSGKTFDYWVDVEGNPVDFTQPVTQSQIYYAKYSMQYFVDHYGEAFLYAIVLLLVLVMVLPSGGVMGRVGNSMTSWQDTDGSGYTVYMEECSEGYPVVAMSQQTEDALTIGTYKLTDLISAKDAAGNDARLTLLGVKYADGEWQECDQPVEEIAFQARGIYTLRVEVRDGKQRAVIKEIKLPVNGGMYEFMKEYGGMLLCELVSVLVIISYFFPMLCGGTLGQIIMQYMAGLLGMDVFVEELGMGALIFVVGRYLIQAALSVLTLLTAWMKAIMEVYGALIVLILSLGTGLQVSGATEKAAQAKRYHAEAVSEIENSNFNPDVIAAVKSSAQASGYVLTVTPGTYDTARDITSAEVELTYTYKIPLLGVEQTRMTKGIARMERKKRKKREKTPGSIWNPVNLQREVHAFGYDFYWGTYLLSVLLVLLLIGMVGILFKLRLVFVVGVVAVALALLPLFIVGMYREMYEQKRFADVTDYMEQVLYSFAKENKVLSALKECEESFPEGRMRQAISDAILCIENGVSEQGNVLRDAFAIIEKQYPCTKLHVVHELLISAEGRGGNVRTSIDLMIEDVEVWKRQVYGLQKDKKTERANCIISIIGAVAVCCMTLYMLDSTKSAMDIALDLTVFQLGPVQVSSFLFVLVCFFAFYASNKKLTSDWLEQKTINEKLVLDAYARVKAYDGKKSEKRSVLMSLPFFIMAVVGVVLSKEVISVVCGVIGVLVLTASRLVYSMAKKDVEGALYQILPEWMFDMALLLQTNNVQVALAKSIESAETLLKQELMELVERITDDPENIQSYLMFFKDFDVPEIATCMKMLYSISVAGSGNVEKQLTDLVGHVHKMEEKAMEQQGKNIAFKAHMITLYPVGATSAKILVDMMCGTIMFFQIFSAALMARIIDFTPTEEQFGVFWKYLEKPDVTELNFSNGMLWITSLWQGRYAVEETVSEKFLTRFTTAIANAVNKPYNSVDPVLEADTKEFRISVLHPSIARTGVSISIRKSPPVLRNTAKGLLDQEFCSEELLALLINCVQARMVIVNGGEPNAGKTEFAKFLMKYIPAEDRVITIEDSLELHYGSINPAHDWVALQVRDGFGYKDAIKVSLRQSPSWLIMSEARSAEVVNLVECWSTGVAGITTIHLSDVRKLPDRMVNMAGVRDDSFVNQVCSYVDVGVLIRMEKGCDGIIRRYLDQMCFYTRSEGENQICMIFDEGRFLTKDIPVEVAKRFKRAGIVNPYRCEQLEWDLYRNAEQKGDGDGKEKKKKAMEFFMGHFGKALLTGASILAVGILVVAFLKSDTANSLLTNVVTDFVGSMQNIGSMNIKFGADIYAPKEVNELARASIGYIESDVMDIKKRYVTLGFHLYEMDQCRYYEDLGYENLYECIEANFAMDKSAVSRCIGVWKTFAAVDGDGSRKMWVDDRYKDFSYSQLAEMLPMSECDRCKIRSDMSVKKIREVKQQLKETKQKVDEVVPIAVKENKSVEEVLAVATSQPEEMVEDQPVEIVAEQSDRQGQPDFPDMKNMQEREDFVNTYKDWKIWCRNDLTEEVFYRYDLPDGAAIVIKVFPYIIPCWSKKEAEGRRLYLLKPGYKHFADCESNMTSLKEYLKDLKKKKMANYVVIGYFRRPHKDCEAETQECETYMEALELKDEWKKERKYKEVYIGTKTSDSREQEAADEHMGEIVVKNLTTLTDAAALIHVALYLTDTESVAEDKYHVKLNETVTGKLVIVIAERMSGTLAYELFGPFELRVVFLIMVVMMLICLDPLLKALCECVEAIRDFFETMKKRMTEFEMDLIKDMVSLFVVFGAVIGSLCFFYAFCMFVEVTGIFFETMKEKMELFRTKRDKFLGKEGGEEMPKTKLCENKEAARCNYVAGMIVGGLRRGNIETDTASRKVGMSERTLQNKLRNPGSIKLGELYRLADLAGIAISVQYKNIPEMADVITVRVPEELKQLLQAYAKQTGISVNALVVYVLWEWIREKQMPKTKLCENKEAARCDVEEKRKCESRVPALVRMPGELKMQLGKEACELGLSFNGYVLLLIHKARQCMYAKYVELRDNKRITDYRVAKDTGIRRSVFSDWKSGRSNPKADKLKILADYFGVSVDFFLDDDKGNVMLVLVYCFIYNSFEIVPEFRFCFCQRGNETFTECFVFVMVDEAEKCRREIIREVRSIQNLWILKQIWMVIKNIQNMYRWKKKWSEEQLARVAGVSRSVICKLENGTNTNPTAEVAFRLADALNVDVRELFYYKRGEQDHGGMAKRKIGELPSGNVRKKIYDHSELCFDEQGKPIIDPKTGKQRKKKIYISVTAASATEANRIKAQIQANKKTLQKPISMTLYDAIDKYISSSDALLSPSTIRGYRTIQRNAFKSIMSCKLSTLTNEQLRDAVNLECKRTTGKKNPKPLSSKTVINEYGLISAVLNTYVPTLDCSVKLPQIEHNQHDISTPDVIYQIVKETDIELPVMLAMWLSFTESEILGLTKSKSISPDGSHITIKEVLVKNEHNQSVIKNKGKQPTRDRTLQIPDYIKRLIDQVETDQLVTLSGTALSKRFDRLIKKAGIPHMTFHDLRHVNASIMTLLNIPDKYAQERGGWKSDHIMKSRYMQAFSAERAMVDAQIDSYMQDKLFKNAAERRYDHKYHCWLELFDLKDTTENRNNFLQFCEKNNINLMTQIVSKNHSIYVQLLYLLTGAAIAAIVFFQIFYSTGNYVLDHYLESSTYIEKQNLKYLAKMQKYVTAEHISSSDIAQLNTWVQRQKMIYVRIYKDQIQIYDSDYPKEDVSVSEIAAGNYPWESYYDLELSDITVEVMISGSFSYQLYNWLLVASICLSFAVFLGIVLLGIRKKMKYILKLSDEIAILEGGSLDYSITVKGKDELAMLAEGIENMRIAFQSLLNQEMEMMKENQRIVTEMSHDIRTPVTAIMLYSEILQKEQYKTEEQRKEYVKKINKKAYRLKQLVDHLFEYALVAGDEEIELEEPELFETVFFDLFSETCNYLEQKEFTVDFDVEWVEQKISISTDYMIRIMDNVTSNIIKYADPGEAVRIFSRKEKDRVGILFENRVRLPEEKVESNGIGIQNIKNMMKKMNGECIVEKENQEYRIILVFPYVNMKKEQVLIVEDDADIRDGVRILLESEGYAVMEAEDGRQGLYCLNDEVDLVILDVMMPGMSGLRTCEEIRKISNVPILFLTAKAQESDKLIGLMAGGDDYLAKPFSYAELLGRVKALLRRYNVYRGRSCEWDENENSYLTLNGIKIHEKFNEVYIDGVMKDMSDIEYHILLLMMQHAGKIFSAQNLYESVWQEPYFYSCNSTVMVHIRKLRVKIEDDPKNPKYIKTVWGKGYKFDTDSKMQDFKYFKKIISKNILFMMILVLLLVGVSERIVNLMVANDSYVLDRNKSIFRILREPENSVDIIVLGDSLGMTSISPMAWWGDYGMTGYVCGQTGQRMQEAFHMLQAAYETQSPKLVILETNMVFRCKNLSSEVKDCLGEIGYRYIPIFQGHDIWKSMLSEKQYPAENYKGFAFRCETVPYEQGEYMQKNDQKEEISKIVSFYLEKIRKLCEKNGTKLLLVSTPSPINCNYARHNSIEAYAREKGLDFLDLNLKTEEIGINWKTDSLDNGDHLNYSGADKVTRYLGNYLTQNYTFPDHRGEKTYRTWDKEYKIYEQKAVREMKVIKKAGMAYHTGIYLLLFLPAVLLLYQLTPKKSRWITLLAAGYLFFWICSGKLVLYLLGTTLFTHYIAVWISWIKTKCNDETAGMQRTEAGTIKKAYKKKEKAILVFGICVLLGILAYLKYYNFFIQNVNVLLAQGGSSLALGTKQMLIPVGISFYTLQAIGYMADVYWEKVEVFRHPGKIALFLGFFPQIMEGPISSYAQTADTLFEGNPLTMENLAQGSVRIFWGLFKKLLIADRLYLLVDVIFNNYQYHYGEMIVIVAIAYTTQLYMEFSGCMDIIIGSGKMFGVTLPENFRQPFFSKSAAEFWRRWHITLGVWFKTYVFYPVSVSGIVKKWNKFGKKHCGKYLTKLGISALCLFPVWICNGLWHGARWSYIFYGMYYFVILLAEVAVEPLRDNILEICHLDKNALPYRILQTLKTWLIIFTGELFFRANGLQAGMSMFFSIFKGNNIQSFENIVARQEEIRGILMSVGLDRLDYFVVIAGCIVVAVVGIIKEKKLLGEEGIQKLWLPVRWTLYYALIFAVLILGAYGMGYQQVDMIYAGFMEKLMNILMEIDSSIAWDKEEKLIDDRIMDSFMVISLISELEDQFQIEIDASEIIPENLNSVNAMWRMITKLQESMDLEKFEHAITKYGTPLYVFDIDEVKRKTDYFRDRFRESAGLCFAIKANPFLTCTMSKVTDRIEVCSMGEFEICRELQIEAEKLLISGVLKKKEDITEILNIYGGRCRYTVESVEQLYSYINWSSTHGEKINVYLRLTSGNQFGMDEEAIEKIIASRDQFPMIKVCGIHFFSGTQKKTAEKFSKEIAYLDKFCWKIEQKYGFTMSELEYGPGIAVPYFKDQEDTLEADIKVIKTAISGMKWKGKVMLEMGRAFVASCGYYLTCVHECKKNNDRNYCIVDGGMHQIQYDGQIRGMYQPKCRMYPDGREGKKEKWTICGALCTANDVLVRDIELTAPGEGSVIIFENAGAYAMTEGMSLFLSHELPAVVFYSEKEGFKLARNKQETYKWNMEDHKMKNILDYLERTTVCNAWKTAVDDGNICMTWLELQEMSKSIGTALCKRTGRQKPVVILAEKSAVTLAAMFGVVYAGCFYVMVDPKQPIERLCEIFHTLLPEIIIIPAENEALLEQTGYGECKCLLKDIMKEQIDERKLLAVRKACTADDRLYGIFTSGSTGVPKGIVVSHKSVINFITHFIHTFRFTETDVIGNQAPFDFDVSVKDIYTCLMTGAALVIIPTKLFSVPPVLLDYLCNKHVNTLIWAVSALTLISALHGLKYRIPIEVKRVMFSGEVMPVKQLRQWQLALPEAEFVNLYGPSEITCNCTYYRVKRIFEDDEILPLGKAFDGRKVFLMDDEGKEISTAEKNGEICVSGESLAEEYYHNPEETRKKFRWMETADGMVRYYCTGDLGYYSAAGELYFSGRKDFQIKHMGHRIELEEIEHALNQLDGVENSCCVMNTKKNRLVGFYFGTAESKEIKNGLKKKLPQYMIPHTIVRVAHMPLNKNGKIDRNYFGKRQEVVTMKSAYNKEIWRAIRKGKKRFFSIMLITILGVGMLTGLRAACMDLRYSADQFYDRQGLYDISVVSTLGLTEKDVDALKALDGVADAVGVYSETVHAKVNDHEVSIAVCTLNDRGINQPYVLSGRLPESADETAVTTAFADETGCGIGDVIAVDTTDDEESSLLCSRFTVTGIVVDVQDVNNAKGATAFRSGQSEDDTVFILPEAADSDIYTQVCLTVDGAAELFCYSDAYEEKVAQVTDAIETQIKENREQARYVEVTDEAKEKLADAKAEAEESFAEAEQQLSDARAELDKGWQELSDGQEEFDAEKQQAEDGFAEARDEIAAGKQQIADGSAQLDAAEQQLSEGEAQVASGKQTLSAKEEETYAQLDAARAQLTESSKQAAETEAALEAQAQEVIQAYGEAWPAEAWDAYVQAAVEAYLPVARAVVAEQDASQAQAAVPGLVADSQSAFLEALQQPTADQLVQLAMGLGNVRATIQALGEAQAQLDTAEQTARQQFDAAWNELNEGEAQIIFGKSQIADKRAELENGSMALSEGEAQLAQKEQETAAQIKDGEENLAEGREKLLEGETEYADGKAEYEENLADFNETIAEEEQKIADIDMTQWYVQDRTSLSGYANVKSDAASIEAIGTVFPMVFFVVAILISLTTITRMVEEDRGLIGTYKALGFTDREIRRKYLVYACAASVSGGILGNVCGFVLLPEIIFRIFDTMYLFPEYLLRFMPLLGCGGAALFAAGIVIATACACKAELVHMPAVLMRPKAPRAGSRVLLERITPVWKRLSFLNKVTARNLFRYKKRLFMTVAGIMGCMALLLFGFAVRDSVTDLLPRQYENVYRYDVMAAGAASDNDKILSYVNGDPNVQSALNVQISTVKLKNAAGKEEKAQMIVVPGDEPLAEYIGLYNLKDEEIGLLDGEILVTQNAANVLGFAAGDQVEIQDQDLNQREVTVSGLVRNYLGNNVYMTEKTYESLFGDYEPNGVFLKLSEECSDEIAYADDLGGKEGIVSYTSKQELSDEFSDAFTLINMVVYIVIIMAAALAFVVLFTLSTTNISERSRELATIKVLGFFDREVHLYVNKETMILTAIGIVCGIPLGYAFAQTLTYVLNMPSIYLAVSLHGKSYAMAAGLSFLFAILVDLLTNRSLDEIDPVEALKSVEMAYIEFNNVTKEYKTGETSIKALDGASFSVEKGELAVILGSSGAGKTTALNILGGMDVPTAGEIKVDGRDIAKYNKKQLVGYRRTDIGFVFQFYNLVPNLTAIENVELAAQVCRNSLDAGEMLTKVGLADRKNNFPAQLSGGEQQRVSIARAIAKNPKLLLCDEPTGALDYNTGKQILQLLQDTCRNDGITVLLITHNSALAPMADRLIRFKSGKVTEITCNAHPTPIAEIEWMRKLYVKLAAVNIRNNRQLYLPYLLAGVFSAAMFYLVQSIQDNPGLDQMRGGANVAVTLLLGVIIVGLFAAIFLFYTNSFIMKRRKRELSVYNILGMEKKHIAKVLFLEMLFTAAVTIGGGLAFGIVFGKLMTMLLYRMTGFNQSVPFTISLTGCHHTLVLFGCIYAVTLFYNFMQIKLSNPMELLHSANAGEREPKTKVLLAVIGAAALGGGYYLALTVADAVSAITMFFVAVLLVILGTYCLFTAGSIAVLKLLRKNKNYYYKSRHFTTVSGMIYRMKQNAVGLANICILSTMVLVTVSTTLCMYLGVEDALKRRFAHEVSVVSYYNAMPEYPEEVDALAEASLKDSGRVLTGHSAMLNMSLTAVRTDDGFSVTGIGAGTDYSINDVVLLTILPKSDWENYTGETVGELERGEIALASSSSYEKGTLALDNEIYQVKQICAYPEAERDYLDDMADDSVFMIVPDRETLGQIFTELKQNWDEERVSLQIKYNMAFDIDGTAEEKVAAENALHSVISSYNDGHPSDDTKDSYSRTYVECRAQNRDEYYSLNGGLLFIGLFLGAMFLMVTVLIIFYKQISEGYEDKERYAIMEKVGMSNAEVKRSIRTQILTVFFLPIGAAVLHVVMAFPMIKWILAAFSLNNTALFALCVAATALVFLLIYLLVFALTSRSYYKIVGNQVMAILEVRNLKKIYTTRFGGNQVQALADLNFSVEKGEYVAIMGESGSGKTTLLNILAALDKPTAGEVLLNNKNIVTLGEREISKFRRENLGFVFQDFNLLDHFSLKDNILLPLVLADAPVQEMEERLWPIAEKLGIDALLEKYPYEVSGGQKQRAAVARALITRPQLILADEPTGALDSRATDGLLKLFGTINGEGQTILMVTHSTKAASHAKRILFIKDGEVFHQLYRGNMTNEELYVRISDTLTVLTTGKEGGCHAMKQKIGRSYIKCRLKWIAAVIGCGIVMTAVLFLNEVPAGEIAYGMLLCLGILLVAVTMDGISYGRRHRELLALRQSITVSLENLPEPGEILEEDYQRLLGLLAEEKMRIWNTAVSEKRDLMEYYTMWVHQVKTPIAALKLLIEEEVDIPGEEEPLGEDRERLQQQREKRRDEELQQLFAIEQYVNMALSYMRLGSETTDFVLRQTDLDGVIRMAVRRYARHFISKKITLHYEETGARVLTDEKWLGFVIEQLLSNALKYTHEGSITIGMEKGRLTITDTGIGIRAEDLPRVCEKGYTGYNGHANQKSTGIGLYLCSTILKKLGHSFTITSQEGTGTRVTIGFPEESMYRILIVEDDEIIARSLKKHLESWDYDVVCVEDFSDVMKEFAGAAPQLVLMDIKLPFYNGYHWCSRIREVSKVPVIFVSSASDNMNIVMTVNMGGDDFIAKPFDLDVLTAKIQALLRRTYDFAGQNTVLEHRGALLNLGDATLTCGETRVDLTKNELKILQVLMENKEKIVSRDTLMTKLWESDSFVDENTLSVNVGRLRKKLDAAGLPDFILTKKGIGYHIGMEMEMEFLRKLPTPQELKEQHPVSAQIVATKAKRDDEIRDIFEGKSDKLILVIGPCSADNEDAVIDYISRLRTVQEKVSDKIFMIPRIYTNKPRTTGIGYKGMLHQPDPERESDMLKGIIAIRHMHMRAVEETGFTCADEMLYPENHRYLSDLLSYVAIGARSVENQQHRLTASGVGIPAGMKNPTGGDISVMMNSIIAAQHGHTFLYRGWEVKTTGNPYAHAILRGYVDKFGRNIPNYHYEDLQNLLEHYEEAREAGHELAHPAVIIDTNHSNSSKQFMEQIRISKDVLHSCKVSGEIRKLVKGLMIESYIEDGAQKVGDGCYGKSITDPCLGWEKTEKLIYELAELWMEKKKRYLLNCEVCDARKMHENLFDPYDEVVINADVLLVNEDARRNLSRYPIQLNGDNIVEAEGDVDVQVQNGWMELKCGQMPARKTVLVVNGGLAISPGTEELLKNYLAIIVNGSVRYPESLSAGLTRMKVNGKTSVYPDDCIILKGSAKIDAYFPLRAEAGARYYAERRVVLLDEKLDVAALAEKQVRFETQELLVTESNVEAAVPLVGAATTLTVVPDGCAYVDEVDGVSLDERLLRKYGKKLYINGDLSLDANSTPYLAQIEYLYVNGTVLLLPEQKDAFLALNVDYKMMIVRSGLQIANRLKAFVGPDLLDETPLGITIQDCVQVILEDDLTAGQIQEKLKFKDCMEIICNEAQKQAVQMVSENVARINTDPGKGSKEEEDAFDGVRINAESYVLMIEDLYEKYHAELIRWCRRMTQNESAAEDLVQEAFYRALHHTQELDGMDLAQGRAWLYRTVKNLFVDRFRRERREAVMAELPEEARYTDYGELENAQLLSGLPEEERILFTMRYLEGYNSRELGELFGIPPATVRMRLASARKHLQREWEDMKQETEEWRAAEKKQYEKMTETPVSKLIIMLGIPTTISMLVTNIYNMADTYFVGELGTSASGAVGVVFGLMAIIQAFGFMFGHGAGSIISRRLGAKDVESATRFASTSFVSALAAGGLITVLGLLFLEPLMRLLGSTDTILPYAKTYAIFILIAAPFMASSCVMNNILRYEGRAALAMVGLISGSVINIFGDWFLMTRCHLGVEGAGISTAVSQLISFGILFYMFSSNKTQSRLALRYVTREPKEVLMICKTGLPSLMRQGLSSVSTMMLNGQAGVYGDAAVAAMSIVNRICMFVFSVGLGIGQGFQPVSAFNYGAKKYGRVRKGFYFTITAGEVLLGAIAVLGMFFPAQLVAVFQNDPEVVAIGEVALRVQLVALFFQPMTVCANMMFQSIGKNGRATLLAMLRSGLCFIPVLLLLSNTMGLTGVEVSQTVADILSFFISLPFALHFLRELDQREKERPKIMDCKNRIIKLRESTGLNRKDFCKLVHIPYRTMTEWELDNRHAPDYVLWLLEYYIRNEGLMVKGRNEGGGDSEKETTMREVEILKKKQLKCYLYTRVSTSMQVDGYSLDAQRDKLRKYAAYEDMIVAGEYSDEGFSGKNIQGRQEFQRMLNDIQDGKDDVSYVLVFKLSRFGRNAADVLNSLQLMQDFGVNLICVEDGIDSSKDAGKLMISVLSAVAEIERENIRTQTMAGREQKAREGKWNGGFAPYGYKLENGNLVIAEDEVEVIRVIYDRYIHTNEGVAGVAKYLNRNGYTKKLRQNNTIPGFSRDFVKNVLYNPVYMGKIAYGRRRTEKKQGTRNEMHVVEQSEFPVYEGQHEAIISEEDWYLAQEKRKINSFKREKVNNPDHAHILSGILKCPCCGKSMYGNIAKAHSKDKKTRYYYYCKNTVTPTGHECSFRLNIEQTEINKFVAKVISAMVNNPRFVEAIQAKIGTAVDTEDMERQIAVLQGRLKQAFGTKSRLERQMDTLDINDAHYDRKILDLQRRYDEQYDTIEEIEVQIGELQSQIRSIQQEKISGDNIYRLLLAFDEVYHSATEAEQKEFMKAFIERIEMFPEKRKDGSWIKKIVFNFPVPVDGEEVKELPLETETTMARNDGIDRTVARNQDLETPADVAKVQEHNEREKDSYSNQDMEHRIIDLHVHSTESDGTLTPTEIVSAAKAAGLSAFALTDHDTAAGVSKAAPAAAACGIELIPGIELSTEYELPTRAGGGKEVHIVGLYIDPEHPLLIEKTNEFRRCRDARNEKIVAALQREGFSITTEALLAANPDSVITRANIARFLYDSHQIRSVSEAFEKYIGDGCKCYVGRFKVSPMEAVELIHAAGGIAVLAHPLLYHMNQTTLQHLIDELKEVHLDGIEAIYSTYTTGEEQYVKRLAKENGLLISGGSDFHGTNKPTIQIGTGRGHLYIPYSVLETIKEHLRAMFENVRIKERLTKAFVMVAAITAIGAVVGLAAMLVMSNRYSSALVNYGFSQGDIGKAMITFANTRSATRGIIGFDEQGLLDDAMTEHDEQKAKFENYFATVGDVVTTSEEKALYQQISDKLQQYWAAEEPIIEQGATTDATQSTAAQQQMKESLDPIYEDIYADMIELMNTKVTEGDRLSSTLTAVSVILAIVIVAVSALAMVMANKLGNQVAKGISEPLEALGERFKMFAQGDLSTPFPEVSTQDEVADMAREAADMADKLNLIINDAGRILGLMSQGNYAVQSEHKDGYTLDFEKLIVAMRVLRDQMIETLTSIEDAANQVSAGSGNLAEASQSLAEGATDQAGAVEELQATITSITENIQKTAEQAEESYQQAKQYAGEADQSKNQMQSMIDTMSRINESSNKIGNIITDIENIASQTNLLSLNASIEAARAGEAGRGFAVVAEQIRQLAEQSTQSAVDTRELIEASLKEIEEGNQAVERVSTSLEEVIDGIKQIAETSKRLSDNSKDQAEAMKQAEEGVNQISEVVQSNSATAQESSATSEELSAQAIALDELIGKFVLKNMQLLTFTLTGMDYGISLENVESIESKMNVVVVPTSPANIRGIIRLHGEILPVFSLASRFGLGNIAVDNLVVVNVGGMKLALEVEKVKEIVDVEDSRVLPMPTLMSGQQCCFNDVASCQKELIVMLDVKSLVSQEEQAAIRKMISDNTSEKMINEQIRDKEIRLIGENGEQLGIMSAREAMKLAEEAELDLVKIAPTAKPPVCKIIDYGKYRYELARKEKEARKKQKVVEIKEIRLSPNIDSNDLNTKMNAAKKFLSKGDKVKITLRFRGREMAHMNASKHILDDFAASLGEIAVVEKAPKVEGRSISMVLAEKKSMPKMKTSRAAAKRFKVTGTGKLKRNKAYKRHILTKKTTKNKRKLRKPAMTDATNVKNMKKILPYLMARVKGGLGAKKKHNRTLKLAKGYRGARSKQYRVAKQSVMRALTSSYAGRKEKKRQFRQLWIARINAAARMNGISYSQMMHGLKVAGVDINRKMLAEMAVNDAQGFAALAELAKSKVAMKNIWRIFAKDIKGLVKNPFAMIIALGLCVIPSLYAWFNIYSNWDPYANTSNIKIAVVSEDKGYTLSDGTTENMGNEVVEELKENTKIGWVFLEDSDAALEGVRNGDYYAAVIISDSFTYSMYNVFKENFKNPTITYYENEKRNAVATKITDTAVSTVKQSINEKFIEVVASTIFTQTNELSSEMENQDVFSEFEGKLTNLNNNLIGYSDMIDEFISANAVLEAEIKTADGELPKLSSQIQNGEKSFQNSQSNLNSTKTSLENFSSNVQTTLDGINHSINSITTDINNANLAQNAQSTADNLNKTATDTAELIRQLNQLKKSLADQAANSSGTTGSTEGTGSTEGTGSTEGTGSTEGTGSTEGTGSTEGSGSIDSIVSDEVNQQIQEILNTLNSMNNGAEDIQNALNALLQQGGGTDGSGQIVADMVNRSVASVTQVLNNCSESITNLKNMYTNSLVPQMDGVLNSVSQMLGNVTKLLDNLNTAVNDMGVVFDGIQTTVSDTTESLEQIQTVIDNVSTKLTELIKRLESAEDDEKVDALLKFLQGDPEDYGAFFAEPVQVTTQEIYAIANYGSAMTPFYSVLALWVGGTILVALIKVKPDTAGLSNPKSYQLFFGRYLLFFVCGQIQAAIIVLGDIYLLHCQILYPGLFWLTAALASFTFTLFIYAMALAFGDVGKAAAVVVMVIQIAGSGGTYPIETLPEIYQKIYIFFPFPYAINAMRETIGGMYGSDYMKYLGELLLFAVAALLIGLVIRLPFVKINHFVEKRMEDTEMMMEKKEKYEQMYEMLVTYERKIHEKNQKRISIGLKCIIIIPLIFLFLLFWTESNKVVFLILWIVSLFLLAAYLILVEYMDYNLQEKLSEINDEGTRVDSLIGLEIDNVPGNLRNVIQRIDDGLNSEAETRLIETKASGEETQTVEKAQTAEETEKQKDADAQAVEDADAQKDADAQAVEDADAQKDADTEVKENAMRNIFKIFFADVKRISTNVVAVVVILGLCILPSLYAWFNILSNWDPYGPSATRNLKIAVASDDEGVTILGNSVNVGSSVISALESNTTMGWVFTDTTDEAIDGVYDGSYYAALIIPENFTEDMISFLGGEVDHPDIIYYENAKKNAIASKITQKAKTAVQEQVNSTVVSTLAETTMKVTNALSDVDAEDSDPAESVLVRLNNLSSDLQSYINILNSFVSIMNSAQSIVEASQTMLPNVNNMVSNGQASINSMESLLVAGNSTVSSTADMVSYSFDMMNDSLNNVSSVITNALNRLSEYSQGTSVTVQGLSAMMPYVRQLFDTSVSGWEDTAPEDMQAQINAIRTQLDTITADLTALENNADTSMETVRNLSNKIVTEIANCQKAVDGLRNDFAYNVKPKLENTMSSMQQSMIAAAGILDGVDADFNGVENALSDYQSTLERGSNSLGGSLSMAQELLAKLNSVTADLVSLQQNDQYQELLEIVKSNPEELGAFISSPVNLETVGIYEIENYGSAMSPFYTILALWVGALILVAIIHVKVHPVEGVENVKPYQEYFGRYMIFFLVGQTQTLLTVLGNLFYIKIQCHHPVLFWLAGAVASLVFTLFIYSLTVAFGNVGEALAIVVMVIQVAGAGGTFPIETLPKVYQMLYKYLPFPYGMNAMRETIGGLYKMDYWKDLGALGIYVLISLFIGLVVAIPFRKLNHIIEKNKEGSGVMIMMRLIQMVLLLTGLLMVAAPGACTRKDDRGKPETEKRTRTIGGWLTAAAVIWMITEVLRSFMRRQVLSLLVENNPGVTSHISGLFSRRGYNIDSFSSGVTADPRYTRITIVASGDEQILEQIEKQLAKLEDVVDIKKLEPGSSVTRELIMVKIRARDTERQPILNVTEIFHGKIVDVTHDSMVIELTGHQDKLDAFLDLLQGYEILELARTGITGLSRGTADVKMIDENGHLQSLMSAKIFYQEDCNLSLLDGKTIAIIGYGSQGHAHALNLRDSGCKVIIGLYKGSKSWKKAEEQGFEVYTAAEAAKKADIIMILINDEKQADLYKNDIEPNLEEGNMLMFAHGFNIHFGCIVPPKNVDVTMIAPKAPGHTVRSEYQAGKGTPCLIAVEQDATGKAQDLALAYALGIGGARAGVLETTFRTETETDLFGEQAVLCGGVCALMQAGFETLCEAGYDPRNAYFECIHEMKLIVDLIYQSGFEGMRYSISNTAEYGDYITGPKIITEDTKKAMKKILSDIQDGTFAKEFLLDMSPAGRQVHFKAMRKLASEHPSEQVGKEIRKLYSWNNEADKLINNMSELYNHKVVEKKWQKVWDDNKAFAATDDYSKPKYYALVEFPYPSGQGLHVGHPRPYTALDIVARKRRMQGYNVLYPMGWDAFGLPTENYAIKNKIHPKIVTENNVKRFKEQLHSLGYSFDWDREINTTDPSYYKWTQWIFLKLFKAGLAYKKEMPINWCTSCKVGLANEEVVNGVCERCGAPVVRKVKSEWMLKITDYAEKLIEGLDHVDYIERVKVSQKNWIGKSQGAEVDFSIKGKEDKLRVYTTRCDTLFGVTYMVVSPEHPIIDKYKDELKNWDTIAAYRDEASKKSDFERAELAKEKTGVQIEGLTAINPVNGKEIPIWISDYVLMSYGTGAIMAVPAHDERDWEFAKKFNLPLIQVVAKNGEEVDINAAAFTDVATGVLINSDFLNGLEVKDAKAKMIAFLEEKKIGTAKTNYKLRDWVFSRQRYWGEPIPIVHCDKCGYIPIDESELPLMLPEVESYMPTDNGESPLAAMTDWVNTTCPCCGGPAKRETDTMPQWAGSSWYFLRYTDPHNDEALASKEALKYWMPVDWYNGGMEHTTLHLLYSRFWHKFLYDQGVVPCPEPYQKRTSHGMILGENGEKMSKSRGNVVNPDDIVREYGADTLRTYEMFIGAFDLSASWSEDGVKGCRRFLERIWKLQDIMTNEEGYSSDLETKMHQTIKKVSSDYENLKYNTAIAAMMALLNDFTKKGSITKGEYKTLLILLNPVAPHITEELWQIIGGSGYVYEQTWPEYEEAKTVENTVEIAVQINGKTKGTLAIGRDDAKEDVIAKAKESIADKLTGNIVKEIYVPGRIVNIVMKMEKGTKLLEGSIWKGIVAFAIPLFLGNLFQQLYNTVDSLIVGNFLGSDALAAVSSSGSLIFLLVGFFNGIAVGAGVVISKYFGARDYENLKKAVHTDVAFGLVSGLLLTVIGMFLAPQILVLMGTPESVLPNSILYFRIYFAGSLAFVMYNIVMGILQAVGDSRHPLYYLIFSSIVNIVLDLLFVGVLRMGVGSAALATAISQAASALLCFIRLVRTNDIYQVKIREIRFHPAQLRQIISFGLPSGLQNSIISIANIVVQSNINKFGVMAVAGCGVYSKIEGFAFLPITCFAMALTTFIGQNLGARQYDRAKKGAAFGIVCSMTLAELVGVIVYMLIPYLAAAFDSSAEVVGFATRQAHVEALFYCFLAFSHCIAGIMRGAGKSAVPMFVMLVSWCIIRITYITITVHFIPKIQVIFWAYPLTWSISSIIFLVYFLKADWIHNFERAEQRMKKWAEWLLVAGALCMGMAGCGSEEKNTSNADAEQKSETASETREEGQAPEQTDTEGSEEAELQTTESDHAETGLTFADLAALQFEFCSGAGGWSTDFTIEKDGSFSGVYHDSDMGDTGDGYPNGTMYYCNFSGHFTNLTKVDDDTYEMSLADISYQNTVGDTEILDDMLYVYTDVYGLEGTDTFRIYLPGTPREKLTEDEWFWIAAGNESETELTMTVIVNEPNEYGIYSYERSTPSEEAQGIYNSLLNYNDELEQQLQSASTQQEMNEITAQMYQNSDDSLNQIWHIVKYNSDETEFAQILEEQKSWITEKEAEAEKIRAANNGSSAEMDVNIRLNDLTEERCRVLLEYLKDLMIDNVTFGAFVRTLRKEKQMTQLELAKILNLSDKTISKWEQGKAFPDIAVWEALAEALDVTVAELFAGEKLPKEEGKVSTAIFEDGIAVAANEVRQKKKRYRGLLMIMAALLVVVAGLGIGKSLKEKFAVYMVSMDATILEVHEDYWEVRGKVTDAKGRSGVYDISLTEPWYLEHPVDGKEGDEIRFFYREDWKNRTLKENEYIQGIFSMEKVEDEMNQNLSSYRIFYTVANTGNISKAAKELYISQPAISKSIQKLEESVGCRLFSRSSRGVVLTDEGQLLYEHVKTAFETLTLGEEKLKRSIELGVGHLKIGVSATLCKYMLLPYLKEFIRQNPHITISIHCQSTNDTLKLLEDDKIDIGLIGKPDNVKNIHFDYLEEIEDIFVATKDYLRNLHARGVRKDEILTSSTLMLLDQNNMTRQYIDDYLQENHIVVHDSIDISSMDLLIDFARIGVGVACVIKSFVQDDLASGALVEIPLGIPIHKREVGFAYRTNSKPSKSLNEFIQFYQNFMGMTMTQKILAAHAGLPSVCAGQLIEADLDLVLGNDITSPVAIHEMDKMKVDGVFDKDKIALVLDHFVPNKDIKSAQHCKCVREFACRHDITNYFDVGEMGIEHALLPEKGLTVAGDVIIGADSHTCTYGALGAFSTGVGSTDMAAGMATGKAWFKVPAAIKFNLTGKPAKWISGKDIILHIIGMIGVDGALYKSMEFVGDGIQYLSMDDRFTIANMAIEAGGKNGIFPVDDLTKQYMEKHSKRPYVIYEADEDAEYEQEFTIDLSTLKPTVAFPHLPENTHTIDEVGEIKIDQVVIGSCTNGRMDDLRVAASILKGHRVAKGLRVIVIPATQQIYLDAMEEGLLKTFIEAGAVVSTPTCGPCLGGYMGILAEHERCVSTTNRNFVGRMGHVESEIYLASPAVAAASAITGKLSGPDEIAMKAAKGHVFKYGDNVDTDVIIPARYLNSSDPKELATHCMEDIDKDFVKKVKAGDIIVANKNFGCGSSREHAPIAIKASGVSCVIAETFARIFYRNAINIGLPIIECPEAAKAIEAGDEVEVDFDSGIITDKTKNTSYQGQAFPPFMQKIIDCEGLVNYINQKMTQGVSIATKKDGTVYYRAGLYYKNKHISLGSYADETTAGNAYLEALAILGSLDQLPEDYIEQPTTLSFEKIIVLLNFRNNGIYFKNPIYLRNGYFSYYLSRIEELKFDVDDLFYYSSRKIQKRQGHLFVSDYGMQYSILSRYGIRPYAVAGRDYQFVNGDKSDFRYSNIVIVNRYHGVLQFLKNGLPRYRAVIHINGNYQIGSYSSEEKAAIAYNKAVDLARAAGIQKNFPENYVDTLSPKEYADIYTGLKISRRYLNYLEQIAQKVNSISDMKKISTKVLIPVVLLAVIAVISAVTGLKNANELHTSSKEISDTTVNQLMLLNDISSNFKSIDAITYRMCVSTSKDERDQLMEQVDQYRTDIQTSIDSYEALTQTQEEAAAMETLRENFADYTEVYDRIADFISRGNKDKARQICNTVLAPTSENVDGVLTELEGYMEANVDAGVAEQESVYNNSRAVSGVTFVLVLVFFVVAVIGSVRTVVNPVKSVTTQLNDILKEIESGNGDLTRRISLKNKDEIGQLAGGINVFLETLQQIMSRIVIDSREMGEIVSRVSGSVGTANSNACDISAVMEELSATMQEVASAVNTVNTNVAQIGQDVNEITKESQDMNSYATEMQSRAEDMKEKAVANKETTSRMITDIIETLKAAIEESKSVDRVNELTEEILSVSSQTNLLALNASIEAARAGEAGKGFAVVADEIRKLADSTRETANNIQSINALVTQAVNKLANNSNAIVEYIDGTIMPDYDRFVENGVQYRDDAAYVNTTMDHFEEKARNLQQIMEKTVDSIRDISTAIEESANSVGNAASSTTVLVSNIDTVHSEMETNQSISDRLKGEAGRFKNVMELVYASTRDAQERVTASQAILRGLANDGGLFVPTQIPALDVPMEELGKMSYQETAYEVMKRFLTDFTEEELKHCINSAYDSKFDTEEIAPLVEADGAYYLELFHGSTIAFKDMALSILPYLLTTAAKKNHVKNEIVILTATSGDTGKAALAGFSDVPGTKIIVFYPKNGVSPIQEKQMVTQKGDNTFVVGIHGNFDQAQTGVKKMFSDAALAKEMDAAGYQFSSANSINIGRLVPQIVYYVYAYAKLYANGVIAKDEPVNVVVPTGNFGNILAAFYAKNMGIPIAKLICASNENKVLYDFFSTGTYDKNREFMLTSSPSMDILISSNLERLIYRIAGNDAEKNAALMRELTTTGKYEITPEMRAQLKDFYGNYTSEAETAEVIRTLYEKTGYVIDTHTAVAAGVYGKYKKDTGDVDTKTVIASTASPFKFTRSVMDAIDHKYDSMSDFELVDELSRIANVAVPQAIEEIRNAKVLHDTVCEVDEMPQVVKNFLKIMYAQFFGNYLLSHGVVTREQLLETMHRKSSTKIKLGTLAIHAGYMTANEVDRIVILQTHEDKRFGELAIHEGYLTEEEVTKLLAEQKPDFLLLGQALVDEGLINNQQLQELIIDYQSENELDDYSYSEEDQNAIRHMIENFFILAERPLSKYEISFFQLLFNNLYRFIGDDFTLVSPSSCKEYPTNYCVSQKVSGSFSIRTYLDIPENTCIAFASKYVNENFTEFDEYVRSSVEDFINLHNGLFCVNMSNEFSMNLSLEAPVVEEKDLLTFEHETYLLPVLFPFGTLHFIFEICSEKMMLNGIKILIGDDSILARKQLKDIVSTYGTPVFLEASNGQDAIDLYKKESPELVFLDIVMPVKDGISAITEIKAYDKDADIIVVSSVGTQTQLKAAIEAGANDFIQKPLNAEQIHHIISSRFEGRMDVMLIFDVVIAIFGVYMIGAALKMKKTGKISSAVITAEEIARCRKTKEFIAFIYWKEAVFGALIIAVGVLGIINDKVVSLGAFNVVELLIFLAAFLWFQSQLRKAREQFLMRRILVVDDEEKIRAIIRKYGEFEGYDITEAKDGMEAVKLCREQDFDVIILDIMMPELDGFSTCREIRKTKNIPVIMLSARGEEYDKIHGFELGIDDYVVKPFSPKELMMRVKVVIDRNGGRDSASTNGHEIFQAEGLVIDFTGRTVTVDGKRAELSPKEYDLLFYLVRNRNIALEREKLITEVWGYDYYGDDRTLDTHIKLLRSSLGDYRKFLVTLRGVGYRFEAMKHEKISIKWKIFFYLLVFTGILLTVLWLVQICYLDRFYKKIKSQEALELTSEVIEVLQSDSQNIEEQIDALAAQNNMIVFVTDTDGNTIYSAEYIPNSRLCEMPQEMIQKLYEAAKSKGGSTKLEFEGDVGKNDFQNPQDVMNPDAAADAEGAGNIPDAADVTGAGAENAPDVADGAEQETAGMPAENGFMQNHGQERIESVIYVNVVSIDGNERILFVNAQLTPVDATVNTLRAELVWITVIMIVLSLGIALLISRKVSRSLIGLNASAKEMAGGNFDVHFDGTDYREVAELSDTLNMTARELGKSERLRRELIANVSHDLRTPLTMIIAYAEVMRDLPGENSPENVQVVIDEAERLTNLVNDMLDISKLQAGVLEKNVTVYNLTESIQSVFARYNKLKEQDGYKIDFSYDQMVMVEADEYKIFQVIYNLVNNAINYTGDDKQIWVRQIVREDGYVRIEVTDSGEGIAPEALPYVWDRYYKVDKTHKRAVMGTGLGLSIVKNILELHDARYGVESEVGKGSTFWFELKVYQIVMNQFCEITPELRRLAAKSAECSKIDPELYTRYDVKRGLRDLNGKGVLVGLTEISEVSSTKIVNGESVPADGELFYRGYNVKDLIAGLPEDSHFGFEECTYLLLFGKLPKKHELRDFSALLSSYRTLPTSFVRDIIMKAPSKDMMNTLARSVLTLYSYDEMADDVSLPNVLRQCLQLISLFPLLSVYGYQAYKHYHDGASLFIHSPKEEYSTAENILHILRPDSKFSLLEAKLLDIALILHMEHGGGNNSTFTTHLVSSSGTDTYSVIAASLGSLKGPKHGGANIKVVRMFDDMKANLKDWTDEEEISRYLTALLHKEAFDHAGLIYGMGHAVYSLSDPRAQIFRGFVKRLSAEKGYEKEFALYTAVERLAPQIIAAERKIYKGVSPNVDFFSGFAYSMLGLPVELYTPIFAIARIAGWSAHRLEEVAGGGKIMRPAYKNVGEHKIYVPMDERVMDLNIELLAKKAIEAKEHAYVPYSHFRVGAALLTADGKIYTGCNIENAAYTPTNCAERTAFFKAVSEGERDFTAIAISGDADDYLYPCGVCRQVMSEFCKADTFQIILVKEDGTYKIFTLEELLPGAFTETELKKGQRMMRYSIEGEPLPVVICNLEQGEVMITESGAMSWMSPNMKMETTGGGIGKMFGRALSGESIFLNRYTAMNGNGMIAFASSFPGSIRAFDIVPGQDLIVQKSAFLAAVSSVDLSVFFQQRIGSGLFGGEGFIMQKLSGSGTAFLEFDGYIKEYELAPGQQIVVDTGYLAAMTGSCKIEVKTVPGVKNMLFGGEGIFNTVITGPGRVWLQSMPIAQMANTLRPYFPSNNHMGKRTKKSGVKAHIGIACLMLLLVAGALASGYRDRQLREQETLPEEWVELAEIKEELSFGVYGKEDWKAFFETFPEDRLTGEVLGELLAKLQLSDYIELPVMREQQKVSREDWNYVYGQILDLLDMEHVVTKMEFLVVDVMEAENQNVIITNKGEFCTVLPASYFKQWNGYEGYCVENRCIGVVGTLKKEFTLDNAYLTDCSEDGVDFLYAGAAYHKDAVSLAEDVAPCVCDIVLADGELTALRVKQETIEGELLSYDDETIEIKGYGKLCHTGKLPVYQTYGEVSEKSISDVTLGNMNVEYVTGEKQVCAILIREPAVIREIRVLLLGDDGTKCRQSVYLKCTSDAAVTWQGETTQVAAQTLIAASDQMTGDTQGTFTVTPEQEGCVVICDADGAELSNGYGGSMEVRCLGDGYTLVNSLPLERYLQDVVPSEMPASYEPEALKAQAVCARSYACIQLLRGDLAEYGAHIDDSTAYQVYNRVTDADAAREAVIATQGEVLSYQGNIVEAYYFSTSMGYTAAADVWNVEDPAEYGYLTPACLLTDGKMQDLSGEEAFLAYIQSPADGYDSDCRYFRWRAEADYHGKTDEVNSILLERWKSSPKNINFYPTGQTTEIQNPDAASVEALGEVTGMSAAERGSSGALLAVKITYEKGSALVRTEYNIRKVLGACAGNLVCADGTEQTDVTMLPSAFFAITKQGDGGMVLYGGGYGHGLGMSQNAANGMAKAGMNYEEILQYFYNDVKLETMKMIWKLIGNVKSFLDKCKRDKINAYSAQSAFFIILSIIPFLMVFSSLLQYTSVTESMLLEIIRHLMPEYVSPFLISLVDEVYSRSMGIISITAIIAIWSAAKGVQYMTDGLNSVNDLEETRNWFVLRFWAVVYTVVFLVAIVFTLLVLVFGNQLKVLATQYVPILEHASRVLAHFRGLVMLALLIAFFDVIFTALPNRKLSFRGQLPGAVICGVAWYVFSFGLSVYVDYFNGFSMYGSLTTIALIMLWLYFCMYIMMMSAEVNVVFNAYFRKWWKRFKTSRNKKAMKEKLQQIREKAIAEIEGSDGLDRLNEVRQAVLGKKGELTAVLKGMKDVAPEDRPKVGQWVNDTRTAIETIMEEKMKKLEAEALRKRYEAEKIDVTMPAVKHEKGNLHPVTQVRNQLIDIFASMGFEVYEGTEIETDYYNFTALNTPQDHPARDMQDTFYLSPEFLLRTQTSAGQIHVMEAKKPPIKIISPGKVFRSDDDATHSPMFTQMEGLVVDKGITLCDLKGMLDELVKKIFGKETTTRLRPSYFPFTEPSVEVDVSCFQCGGCGCKLCKGTGWIEVLGAGVVNNKVLEGCGIDTNEYSGFAFGIGIERIAMLKYGINNIKLLFESDLRVLKQIDDMLAPLSWLKDYVDIDVTPKELEEKLFSCGFEVEELIEVGKDISNVVVGLVESCEPIPDTHLSLCQVNAGEHGTFQICCGADNVRAGGKYPLALVGATVYATAKDHVTIEGVMTIKKGKLRGYESYGMLCSGTELGLNEDLYPGAGYNGLLVLPEDAKAGADVKPILGMDDWIFDIAITANRPDCQSIYGIAREVAAVLGKECREPALDYTETAVKKDFKVEVSAKDLCPRYIAHYVHDVTIGESPAWMRRRLALVGINSISNMVDITNYVLKELGQPMHAFDYAYLEGDQINVRRANEGERIVTLDEKEFTLNSSNLVICDGVKPVALAGIMGGLNSEIKDTTTEVMFESAKFARDNIRKSSRALGQSSDSSAMYAKGVYEYTTVMAMKRALHLVEELGCGKVSSTQLEVSTGNSIEPKEMKVSVKRVNGVLGIEVPEEDMLRILSALQFAPSIDGDELTLQIPAYREDMDSYPDVAEEVIRMYGYEHVIPTFMPTAKVTLGGLNLKQKTELKIKRALCAAGAYEGVHYSFFSPSDLDLLRLPEDAPERKAIKLINPINVDLSLMRTTLASEMLYAISRNQKKGILEGRIFELGNVFIPKALPLTEYPDERETLCAGVFGENESFYTLKGLAETVADALNVSFTYEAAERTFLHPYQTAEIFCEGERVGYLGKLSYEIQDELDMRVPAYVMEIDLAALKKWYGKEQIFTPLPKFAEEKRDFAFVVDKNITCAQIENGIREACKYVTDVNLFDVYEGIQLGPDKKSMAFSVVFTPQEEELTGEMVEGFVKKILKHLEATLDIRLRAMDVKDFYYDLPQELIAQDPLEDRSSSRLMVLDKATGEVEHRHFKDIVDYLRPGDCLVINNTKVIPARLYGVKEGTEAKIEILLLKRKENDVWETLVKPGKKCKIGTRINFGEGLLTGEVIDIVEEGNRLIQFHYEGIFEEILDQLGQMPLPPYITHQLKDKNRYQTVYAKYDGSAAAPTAGLHFTPELLEQVRAMGVEIAEVTLHVGLGTFRPVKESDVLKHHMHSEFYRIEQSEADKINRAKQAGHRIIAVGTTSTRTLESAADEHGMLHETSGWTEIFIYPGYQFKVIDALITNFHLPESTLVMLVSALAGREHVLHAYEIAVQERYRFFSFGDAMFITAKMLEKRKHKRLKMEHALELARLNADGTADGGVVNADILNISRGGVGFLSRKRLEVGSYYDTRISLFSREMIDAVLEIVHVEEQEKGYYYGGEFIGISDSNAVKIDIYQVFHDIMRIYRAKDYYDMSRKAANIISAQVIMKPDCVLGLATGSTPIGTYAQLVEWYKKGDLDFSEVKTVNLDEYKGLDQSNDQSYFYFMAEHLFDKVNIDFQNVNIPNGMETDADKECARYEAKIKALGGVDLQLLGIGHNGHIGFNEPNGQFDRTTHCVNLTQSTIEANKRFFASEEDVPRQAYTMGIKTIMQANKILMVASGEDKAEIVKRAFFGPITPEVPASVLQLHNDVTLVGDEAALSLIGSCQSMKISKVINNNVLSAFDENGQEVVLMGRGLGFKAKTGDDIDESRVQKVFCIENSALSRQFQEMISNIPMEHMQISADIISYAKNECGMELNQSIYVALTDHINFAIERYRKGIALTNAILWEIRQFYRREYLVGEYALRLFAERLDIHFQEDEAGFIALHFVNAEYNTDIHDTYMITDVIQKGIEIVKAEYQKALDEKSMHYERFVAHLKFFARRIFFSKEMLSDEEQEFSDLIELKYPREYACARKIADYIEAQYDCTVTKEEIMYLAIHIRRITTDSDEMFGLFHKKEQKALELGAPVSGQAVPLQEVSDPTFGGEILGKGVAVRPTDGRIYAPADGEITLLFDTLHALSMTTDTGAELLLHIGLDTVALKGAHFKAHVKTGDKVRKGDLLLEADLKAIREAGYDVITPMIVCNTDCFAEVKAVTGAEVTPQDTVLILTSKMMKYLQKLGKALMLPVACLPICGILMGIGYALCPATMQGGDIAGAKALIGFFLVKAGGALIDNMAWLFVIGVGVGMADDNDGTAALAALASWLMITNLLSTGVVTTLMPSIAENADKTLAFNKIANPFIGILAGIIGATCYNKFKGTKLPDWLAFFSGKRCVAIVSGVVSIVVSAILLFVWPVVFSALIALGQAIVGMDAVGAGIYAFLNRLLIPTGLHHALNNVFWFDTIGLGDLSNFWAGKTSADVSWDLGMYMSGFFPCMMFGIPGAALAMVRTAKSNKKKIAIGLVGSAALCSFICGVTEPFEFGFMFLAPALYVVYALLYGIFTFITVLVGFRAGFSFSAGATDLIFSASLPAAKNTWMILPLGIAAFVVFYVVFRFMITKFDLKTPGREDDDDDAEKGAKLENNDYTEVARIVLEGVGGKENIESIDNCITRLRLEIRDYTKVDEKKIKSAGVAGVVRPSQKTVQVIIGTQVQFVADEFKKLCKMKLQKIGFIGLGLIGGSIAKRLRILHKDLVIIATAGHAATIEAAYKEGLTDNASPCELSDFYDCDYIFLCTPVQKNMEYLRLLKGHVCDRCIITDVGSVKTDIHREVTALGMEAQFIGGHPMAGSEKTGLANAREFLLENAYYILTPTAQTDPAALEDFKELVASLGAIPMVLDYEQHDYATAAISHLPHIIAYSLVNLVKSCDDCEGTMKTIAAGGFKDITRIASSSPVMWENICLSNQEQILRLIDSFCEELGHMRSAIAASDSKALMEAFTSAKDYRDSLTLHANGTLKQVYELYMDLLDEAGGIATVATILASNHLSIKNIGIIHNREFEDGVLHLEMYDSESLAAAITLLKKHHYTIYERMNVYTTDRIRNVVLLGHGGCGKTSLVEAMAYLAGMTSRMGKVEDGNTISDYDKEEMKRHFSVNTSVVPIIWEDTKINILDTPGYFDFVGETEEAVSAADAAIIVVSGKAGIEVGTRKAWELCEQYKLPRMVFVTDMDIDEASYRQVVQDLQELYGKKIAPFHLPIRENGQFVGYVNVLQQRAKRWKENGEVEKTDVPDYSKENLGICREALMEAVAETSEEFMDRYFGGEEFSEDEIRQALRVNVAEGSIVPVLMGSNILARGIYTLLVDIVKYLPSPEKRTCTGINAKTNEVYNADYDFAKAKSAYIWKTIADPFIGKYSLIKVNSGVLKTDDILFNQHKDVEEKVGKLYVMRGNKPEEVKELHAGDIGALAKLSGATTTDSLSTKANPILYIRTTISTPYTCKRYKAKNKGDEDKISQALQKLMLEDLTLKVVNDSENGQTLLYGMGDQHLEVAASKLFERYKVEIELKRPKVAFRETIRKKVDVEYKYKKQSGGHGQYGHVKMTFEPSGDLEQPYVFEQCVVGGAVPKNYFPAVEKGVQEAVLKGPVAAYPVVGVKAVLYDGSFHPVDSSEMAFKVAAMQAFKKGFMDASPILLEPIASLKVVVPDKYTGDIMGDLNKRRGRVLGMNPTEHGYQEIIADVPVMELYGYNTDLRSMTGGSGTFSYEFARYEQAPSDVQEKEIEARASKVERAEEMRKELLALVSMFVLLLNDPMVAQAYMMVPTDGTGWEQGGTASIDPFLGVNDDAVHLVYELNGGVNHNANLDVIAVEELPFTLEIPVRDGYNFAGWYTDSSYDHKITEITEENAANMVLFAKWTRPIDNRYNVEMYSYQTASVLSRNQKELKECNYAFLDDLDIPGMPSTREKDYLDNLISSEGQCLQGLCFTPDYILMTAYADGSDTKGSLMIFERETGTYLATLGMKEKSHLGGIAFDGENVWICHSNSKTLERIPYEYIERIGADAPGYCVDASALSDEYKLDNIPSCITCYGGRIWVATHTKFFDSEMLSYSYDEENDTLTSLSSYNIPNKVQGIAFDKGGQVYLSTSFGRNSSSYLKVYASLLTLTKHPNEPSAKVEMPPCSEEIAIADDNVYVLFESASLRYFEGTDGKGNSSSPIDKVLEVTVASIWMPYDFLNNNPLLADMSPEKLQFLMNFATAKKPTDIKEMMPFLLSAMNSAKSNNIQFSEPETDLLFQILKQNMSAEESAKADKIMNLMKNRRSGSMDHNETSTFTPFDYMTQTRELQMLKTMLPYMKDTQKKQFAILIKYMELQNTVQVFSQDDKVMSMCSVDEGSNNMVAMLNDLRAFCTSKEQETIDMLANMFSMLETYETIFSMGKGKRKHGIKEAGLLPERNHIRVCGMEIGMLIIEGNSVYEIDEECVRKRKVPEKCQTAQKLQMQRKRDAESGLEKKSERMSDLAATNCGGGCSCSEGGCGSILWIILLLCCCGGNGCGLNSGNGCGNDSCLWIILLLFCCGGCGNGNGNGFGCCMGFVVIAEPDEVNAARIKTILDSLDKDFSYALVGSAEAAIQLVEQNTTDVFIADMQMPVIKGTELFSMIEMMSPETIRIVMTDGARIADTVAFMNECRTFKIIIKPCRVADDLMAPIRAAFRYKEQLERAAGQEQEQETAYSMTEQAYLERRRMWLMRASNNKRAQDVLAELMKVNLSFSDMEAERKERLGRWYVWIVSEYINCVSCGTGEFKTAAEGLAAFGNKPEQQEYFELRCTADEVVDPERMNEVTYILRIITGLCKDILNGYRIMAILEPMEKVYVLRVRIQMYKDSFRIKNTTMREGLSRATELAIDALGYKSVVMNKEQETIFNLALRRMREVVMNKKTNLLQLEEHFYQLVDVEEPNVFHNLFPYSEIPKIAFNDRIVPHNMPENIWITDTTFRDGQQSRAPYTTEQIVTIYDYLHKLGGPKGLVRQSEFFLYSKKDRDAVYKCLERGYKFPEVTSWIRASKQDFQLVKDIGLRETGILVSCSDYHIFYKMKMTRREVMNLYLSVIRECLETGISPRCHLEDITRSDIYGFVIPFCVELMKLMDEYKIPIKIRACDTMGYGVNFPGAVIPRSVPGIIYGLTTHAGVPSELIEWHGHNDFYKAVNNSTTAWLYGASGVNCSLFGIGERTGNTPLEAMVFEYAQLKGTLDGMDTTVITELAEYFEKELGYVQPSRTPFVGSNFNVTRAGIHADGLLKNEEIYNIFDTGKFLNRPPLVSVSNTSGLAGIAHWINSYYHLPKEKWVDKNSDLVKKIKVWVDAQYEDGRVTVLTDSELVEEIGKCCKELNITIMSEDNYSLSSRVFHTIRENILSGKYATDEELKEKSIGEELGVSRTPVREALRQLELEGLVTIIPNKGAYVVGISQKDIRDIYEIRSRLEGLCARWACDNITKDQLDELEENIYLSDFHSSKGNSEQVVELDNKFHEILYDASGSKELRHILRDFHHYVQRVRKVTLAVQERAVNSNEEHRKIVEALKQHDGARAEELADAHMRNTINNMDHYGWDNLLKQMEKIKMTTPLVEMDGDEMTRILWKMIKDELLYPFIDLKTEYYDLGLEHRNETDDQVTVDSANATKKYGVAVKCATITPNAARMTEYHLKEMWKSPNGTIRAMLDGTVFRAPIIVKGIEPCVKNWKKPITIARHAYGDVYKASEMKIPGPGKCELVYTAEDGTETRELIHNFTGAGVVQGQHNLCNSIESFARSCFNYALDTKQDLWFATKDTISKKYDHTFKDIFQEIFDSEYAQKFKDAGITYFYTLIDDAVARVMKSEGGYIWACKNYDGDVMSDMVSSAFGSLAMMTSVLVTPDGKYEYEAAHGTVQRHYYKHLKGEETSTNSVATIFAWTGALRKRGELDGSHELEEFADKLEKACVKTIEDGKMTKDLALITTIPNPVVLNSEDFIKAIRNTLEGMLSLMILSCQNISKSFGTDEILKNVSFHIEANEKAAIVGINGAGKSTLLKIIMQKETPDTGEVILAKDATIGYLAQYQDVSGHRTIYEEVLDAKKNIIEMEERLRGMEAQMNALTGQELEALLDGYHRLSHEFELLGGYTYRSEVTGILKGLGFVESEFDRQMSELSGGQKTRVSLGKLLVTKPDVLLLDEPTNHLDMESIRWLEGFLMNYKGAVVIVSHDRYFLDRVVTKVVEIFQHQGYVYQGNYTEFAKKKAKIREDLLKQYYNQQREIKHQEEVITKLKSFNREKSIKRAESREKMLDKIERLEKPTDENTDIHIVLEPDVTSGNDVLTVEHLRKAFGTHTLFTDLSFEIKRGERVALTGNNGTGKTTILKIINELIPADGGTIVLGSNVHIGYYDQEHQLLHMEKTIFEEIADDYPQLNHTKIRNVLAAFLFTNDDVFKRIADLSGGERGRVSLAKLMLSDANFLILDEPTNHLDITSKEILESALNQYTGTVFFVSHDRYFINQTATRILDLTGGTIVNYIGNYDYYLEKHDELTRIYVEAEPQAQAAQMTEQTVAQDGSGTDKKADWQAQKAEQARIRKLENTLKKAEERIAELEDLIAGIDEECADPANATNSAKLGELTGRQNEYRSELEKCYEEWEQVSMELESMQEKEISQAVIRRMPRYYRYLGELLDAGVERISSNDLSLRMNVTASQIRQDLNNFGGFGQQGYGYNVKYLYEEIGKILGLNQQHNIIVIGAGNLGQALANYVKFEKLGFMIIGLFDVNPALDGVTVRGIKIRMLDELEDFCRENKVDIAALTMPKEKADAIANRLVGLGIHAIWNFAHVDLELINKDVVVENVHLSDSLMQLSYNIVKNQRAKENSRQTDMRYIVNSREMNLYDSRTIEEFHMPQAVLMERAAFSFVETLRREKRNTSRTLVVCGSGNNGGDGYAIARMLMQAGNTVDVLEAPHTGKASVGNQLQKKIFLAYGGKILTEFPEGKSYTLVIDAVFGVGLSRSVEGEYASLIDRMNAMEGAKAAVDIASGISADNGNVLGTAFRADLTVTFAFEKVGCLLWPGNQYAGKVVVADIGITPDAFGERKPAVAVLEDVDLSILAARESHSNKGTFGRLLVIAGSQGMSGAAYLCAKAAYASGCGLVRIFTPEENRAILQTQLPEAVITAYSSKKAETPLLSEAMSWADTIVCGPGIGTTDAAAWMVRTVIKNAAVPVLLDADALNVIAKDTNLLLLPHTELVVTPHLGEMSRLTGDSVAYLQNHLIEAADEFARQYNVICILKDEHTATAIPYSQTWLNVSGNAGLATAGSGDVLSGIIGGMMAQGIRVEQAAPLGVYLHGKAGEAAGARRSMRGMTASDIHDGMCEILAGLEQTQSQPGKDGISMVIRRGDIFYADLRPVVGSEQGGVRPVLIIQNDVGNRHSPTVICAAITSQMNKAKLPTHVELDSQKYALVKDSVVLLEQLRTIDKTRLKDKVCHLDHQILVKIDKALEISLELYTMDDGCSPTVGILIFAGFVILDFVVFGFIAAMQNLNEAAIERLAGEEDRGAGLLRRYTDKNERYTHVCELVVLIVHMLLGFLEVPLWRAYFLPEDAGSVMSVLVDVIIFVILILIVLVFGIYTPQKVASRKPEAWALRLAGPVHVVELLFFPIIFLTDGLSNLLARVFGVDPLSDTDDVTEEEIISMVNEGHEQGVLLASEAEMIHNIFEFGDKEAKDIMTHRKNICALDGTRTFRQALEFIKENNYSRFPVFLDDIDNIIGVLHIKEALELSLDAAVYDTQVSKIKGLIREVDFIPETRNINSLFAMMQAAKSHLVIVVDEYGQTAGIVAMEDILEEIVGNIEDEHDEETNMIELQPDGSYLMSGMAPFDEVVEVLGIPLDEEDDFETLNGFLISLIDKIPSDDEVFSTTAHGYLFEILSVENKMIQKVHVIKLPEEKASDVELADGTCQNEEMSGHSKFANIKHKKEKNDAAKGKIFTIIGREIAVAVKEGGPDPANNFKLAQVIAKARSNNMPNDTIERGIKKAAGDGNSVNYEFCTYEGYGPSGTAIIVKCLTDNKNRTAANVRNAFTKGHGSIGTQGCVSYMFDEKGQIIVAKEDYEGDADELMMQALDAGAEDFSEEEDSYEILTAPDDFEDVRRALEDAGIPMAEASVTMLPQNYVELTAEEDLTNINRILDLLDADDDVQEVFHNWDEMKKILFAASECVPFIKTGGLADVCGALPKEFDKEEWDVRVVIPNYSCIPEKYRSQFEYVTHFYMSAGTYIQDKYVGVLQYVLDGITYYFIDNQEYFNCIVPYGDIRFDIEKFCFFDKAVLSILKQINFRPDLIHCHDWETGLIPVYLKNEFQADSFYWGIKSVITIHNLKFQGIWDMKTMQGLTGFSADLFTPDKLEFQKDANMLKGGLVYADYITTVSDSYANEIQTEYYGEGLNGLLSARHYDMQGIVNGIDYTVYNPKTDPKIYVNYDAADFRKKKPSNKMKLQEELGLAVDKKKYMIGLISRLTDQKGLDLINYAIDRIVDDYTQFVVIGTGDPQYENMFRHYAWKYGDRVSANICYSDELAHKLYAAADAFLMPSRFEPCGLTQLISFRYGTVPIVRETGGLRDTVKPYNEYENTGDGFSFANYNGDEMLGVINYSKHIYFDRKKQWNQMIDRGMANDYSWNNSKGRYEGLYRYLLGEVMSEKQEQKNEDIREFGQVALNNNRENNRISLLTIIGEIEGHDCLPATTKTTKYEHVLPKLAEMEDNRDTEGILLLLNTVGGDVESGLAIAEMIASISKPTVSLVLGGSHSIGVPLAVSTDYSFIVPSGTMVIHPVRMSGTVIGAKPTYDYFKQMQNRILTFIASHSRAGEERLEELMMNTGMLTKDLGTILVGEEAVREGLIDAVGGIDAAFLKLHAMIDAIKGKNYMSLLQAILMGIIQGLTEFLPVSSSGHLALFKILFDVNTDTGILYDVLLHVGTLIAIFLVYYRDILKLVVDGCCIIRDAGYNMIVFFRNKTGKEQRAYRRVINSSYRKFAMLIIVSTIPTGIIGYFCKDVVEMASEILIVPGICLIVTAVLLLIADHCKDGDKLPKNVTYTDAFSVGIAQGIATLPGLSRSGTTITACLLAGYQRNFAVKYSFLMSIPAILGALVLELKDATDLAVSGTEIVYYVIGMAVAAVVGYICIKTMLVIVRKKKFTVFAIYCLLVGALSIGGYFYLAMATGNKKSASGKRKAQTSRKGNTGRKKKTAAQQQEDFTREVILWIIVAVSILLFISNFGIGGTIGNAVSRFFFGVMGLIAYVFPVLLLVGTFFAVSNRGNRVATVKLVAMILFDLFLCMLIELLTKGSAVDGAAAAYSYSFEHRTGGGFIGGLLTWIFCPNFGLAGSYVIDAIMLIISLVLITERSALRGMQKGGKKVYESARSGNERHKERVRIQREEREQRREEQALRRMDRKVEGVAIDTRVLPRQNALEHSDEISELNAEDYLEMPEVLEEKIVPLTADGGYPSAENLTPSAFSDEALAAVSTETSQNVSAWRPEGGAAQGASWNTAPMEASWDAATKPEDPWSSAEAQEQRDPWSSAAAQQPEDPWNTAEAQEQKDPRSSTAAQETAWEEAAPDTTMKETTEAPAVAPARTEVVSAGGGNAAHTTSASAASGESVPAEKMPPERPYVFPPADLLTKAANKAGDSRQHLQETAMKLQQTLKNFGVNVTITNISCGPAVTRYELQPEMGVKVSKIVNLADDIKLNLAAADIRIEAPIPGKAAIGIEVPNKENVMVSFRELVESEEFKKHPSKISFGVGKDIGGKVTVADIAKMPHLLIAGATGSGKSVCINTIIMSILYKANPKEVKLIMIDPKVVELSVYNGIPHLMIPVVTDPKKAAGALHWAVDEMTDRYQKFANASVRDLKGYNAKIESLPTIEGDPKPEKLPQIVIIVDELADLMMVSPGEVEESICRLAQLARACGIHLIIATQRPSVNVITGLIKANMPSRIAFAVTSGVDSRTILDMNGAEKLLGKGDMLFSPQGIPKPVRVQGAFVSDEEVSAVVGFIKEQNGQVTYSAEMEEKLSNMESANTTVAIDSGADAGDGRDVYFADAARLLMEKEKGSIGMLQRYFKIGFNRAARIMDQLEEAGIVGPEEGTKPRRVLMSPEQFEQYEEEYLMKSDIEIAQEARMVHIREVAAKLDIPEDDLELYGKYKAKLSDELICRVSDRKDGKLILVTAINPTPAGEGKTTTSVGLGEAFGRLGKRAVIALREPSLGPCFGIKGGAAGGGYAQVVPMEDLNLHFTGDFHAITSANNLLAALLDNHIQQGNELGIDPRQIVWKRCMDMNDRVLRNIVVGLGSKMDGMVREDHFVITVASEIMAILCLADDMHDLKRRLGRIIVAYTFDGKPVTADDLKATGAMAALLKDALKPNLIQTLEHTPAIVHGGPFANIAHGCNSVRATKTALKLADYVITEAGFGADLGAEKFFDIKCRKAGLAPDAVVLVATVRALKYNGGVAKADLGTENLDALKKGIVNLEKHIENLQKFGVPVVVTLNSFVTDTKAETDYVEQFCRERGCEFALSEVWEKGGEGGIELANKVLLTLEQKESHFKPLYPDDMSLEDKIATVAREIYGADGVTYSAAAKKELKRIADMGMSSFPVCMAKTQYSLSDDQTKLGRPTGFTINVREVYVSAGAGFVVAVTGSIMTMPGLSKNPAAYGIDVNDDGVITGLFMTQIIDGKKISQEIKDELREQVAEQKKLGKEAALAVIQVGTDPASSVYVNNKKKACTYIGIGSLSYELPEETTEEELLALVEKLNGDASVNGILVQLPLPAQIDADKVIRAIAPEKDVDGFHPENVGKLVIGEPGFVSCTPAGIIQLLKRSGIKMEGKHCVIIGRSNIVGKPMALLMLRENATVTIAHSKTQNLPEICKTADILIVAIGKPQFITADYIKEGAVVIDVGIHRDENNKLCGDVRYGEVAPHTSAITPVPGGVGPMTIAMLMHNCVESMLQMKCAKCGAEIKEGCIYCSVCGNAVQIVPDYSVLEDDYLRSLLKEEESAGKEPAPAQAKQQKPKQPQRKKNRRLPFLIGGILLVLLVLAGILIKAAIDHRNANSYDYQMEQAAMVADAQNDGEALDYYERALYLYPNDITAREKMIEIYEKQKNTDAAMVLLIEIIKLDPANEDAYRDLIAIYDAREDYDSILDLEAEVDAEDLKNKDKILDLFADYMTSAPLITDPEGDVPSGKYDEALEVEIASTDGDAIYYTINGDENELDARTGTRYFVGNPLVFDESGKYTIAAVCRNDKGIYSSVTYADFEIELAPPDFAEVSPDGGRFYEPTLVTLTAEDGCSIYYTWDGTDPTTASARYTEPFEVPEGNNVLSVLVVDKKTGLDSGVYRANFIYYPMDIRFKNVAFLTGQMFASSMIRVFPSLEHSEGHVRIPEDNLMKLLEEKILSEGKALNKDILKVDSFINHQVDPVLMAQIGEAFAAHFKGRGITKVVTIESSGIAPALMTASALGVPMVILKKQPSQILNDNLYQTVITSFTKETNYELTLSKKYISEEDHVLIIDDFLANGEAATGAIRLLRLAHATIAGLGVLVEKSFQPGREKLVDQGTEVYALARVGAMDTDHIEFLPADDEMWCPECKNEYVAGIVRCPDCGVDLVESLSISEDKSKDSPDAFSPDDMEELSAASTVRAAEGGRGDTPPLTAHSHAYRSKASQTEDMKSTAYTFTGVGIIGLVLLVLFFCGVLPIHITGAARILMGLVMGIMFVIFLWIGIRSFGQIKQLKDATATEDALQDEILKWFLDTYRADVIDQSVDNDQPEEALYFSRYEVMEKLLLHQYPSLSESFTDHMIELLYAELFMKITILCVGKIKEKFYRDAIEEYAKRLTRYCKLEIIEVADEKTPDGASATEEMQIRQKEGERVLARLEKCRQSSSYVMALAIDGRELDSVELSQKLEKLGTDGISNVIFLIGGSLGMSKELLAAADFKLSFSRMTFPHQLMRVILLEQIYRGYRIMNREPYHKMTGYQIQSHRILLCVLALFCLGMALMGCKKASLDDWYATQADQFQEMTDAVNSQDLGYTLDIVTADSDALVFQYTLSKAYDMSDDADADALTQLYDAIFDSYASTFSSLRAQIADETGINDIAIRLTALNPDGTVLYSRDFTEMRMYDLILKKKQGGELSTDEIRYMIEGFTEGSIPDYQMSAMTMAICFRGMTPRETVDLTLAMRDSGDVLDLSGIKGVKVDKHSTGGVGDKTSLALTPIIAALGVPVAKMSGRGLGHTGGTIDKLECFDGFTTALSEEQFAGNVNTIGIAIAGQTANLAPADKKLYALRDVTATVDQMSLIASSIMSKKLASGSDAIVLDVKTGNGAFMKKLEDSRALAKEMVSIGTMAGKKTVAVITDMDQPLGRAVGNSLEVREAIDTLRGEGPADFKEVVFALGSQMLMLAGRAADEKEARALMEGVIEDGSALDKFAQFVRAQGGDAAPVYDTSLLPVAGKTLEVTAKESGYVHRILAEDIGIACMTLGGGRETKESAIDLSVGIILEKKNGDAVSDGEVLATIYGNDDAKMQAAYEKIAHAYEIAKEPAAFVPVVREYIFPEMLGAAIVTVTGRGEAVISNYKGILEYEDSFIRVQTKTCRIRITGVRLAIDYYTNEEMKITGSIDTIEYENMLLSVIKYFRGYVHVKLTGYAPERFLNLCGNRNILIWNLKPCENGYTFCISVDAFRQLKPILKKTKTQIRIQKRVGMPFCAFRYRRRYLFPAGLLFFCFLLYDLSGFIWNIEINGNSYLTTETILDFLEEEHASFGTKKSRISCEDLEEAMRSRYRDVIWTSIKIYGTKMTVDIQENLLSQEEYEAKSDEPQDIVAAKDGVITEMVTRAGTPLTAVGAEVKKGDILVSGRIEVLNDDGEIMQYLYRPSDADIKAKVLYSYRDVIDGTWVEMAPTGNTKECYSITLLDNVFDWPFFRNPFAEYQVQTESRQLHVADNFYLPVWLNKSEFTEVEQVRHERTEEEIRQIATKNFSDYIKDLEEKGIQIISKNVIIKSTGEKYVVSGDLWAHESIVSYQPTEVYDTTMQERQNENESDMSLTEVSLNIPTDHMANVFGQFDVYIKKIERTLNVTVVVRGEDMKILGDERRCRRAQDVFMQLLELSKRGNVITEQNVNYALALMAEEKESAIVEIDRDCICHTINGKPVKPKTLGQKAYVDAIREKMIVFGMGPAGTGKTYLAMAMAITAFKNEEVGRIILTRPAIEAGEKLGFLPGDLQSKVDPYLRPLYDALYQIMGAESFQKNMEKGLIEVAPLAYMRGRTLDNAFIILDEAQNTTPAQMKMFLTRIGFGSKAVITGDATQKDLAPDAASGLDIALKVLRNVEEIGICELTSQDVVRHPVVQKIVKAYEDYEKRAGKTSGTRKNTSRTGAGRTGARSRRENTNGMDDRYVAKRVIYLLGMSAATILFTTAAAFIRGQYLDEWIVLVIINLVFLALWFFLLEHCRMKRSIAGNRETSYRRIFAGYLASLGVTAVCLVLPEFSRPVMLSAILMLGVGNIELSLCSGLFFCSLLGLLCGGTIHEFSMYILLVLIGAVAADAVENSKKQFWYEWFAGMAGMLLPVLFYYLTYREISVRIMVSAVADGVVVFLFLHLCYRKLADARNAEVDEVMVDITDESYPLARELASFSRADYSHARRVMLVAARCAAVVGADERVCSAAGMYYRIGVLEGAPLAKNGVKMAQRACFPEKVIRIIGEYNGEEALPSTIESAIVHMVDGLLKKLEVLDEDTVGSNWNQDMVIYQTLNEYSAAGLYDRSGLSMNMFLKIREYLVNEEALLVMSLNLEVEVDVPFTFDYEALAGEVVAFTIDHEGFPYEAEVNLTLTDNEGIHEINRMYRQIDAPTDVLSFPMLSYEQAGDFSALEEDYEDNFNPDTGEIMLGDIVISVNRVREQAAAYGHSERREFAFLIVHSMLHLFGYDHMTPEDAAVMEPKQRQILEEMNISRDMGNKKRKNTTSFLAQGTILAAASLISRVIGLIYRMPLTAIIGDTGNDYYGSAYTIYNILLIISSYSLPLAVSKLVSANISQGRRRNVYRILKCALIFALVSGTAAAAILYFGADFITGTLLRTPLCIFALKVLVPVLVIVAVLGVMRGFFQGLGTMMPSAVSQILEQIVNAIVSVWAAYVLFSYGSKAGALLGNAEDYGAAYGAAGGTIGTAAGALSALLFAGFVLVVYLRVFKKTLRKERKTSADSYGEIFKLLIITIIPVLVSSTIYNCNATIDQAVYKNIAAWQGYSKTDYGTWNGIYTGKYQVLINVPLAIASSLAASSVPALSAAYASGKRGEAKRQIGLATRFIMVVAFPCAVGMGVLASPILQMLFGDSSELAARMLQTGSVAIIFFSLSTLSNGLLQGMNRMKEPIKNAVIALALHLIILVALMLGLDLNIFAVIIANACFGLIMCILNARSIRRYSGYRQEVRRTFFVPAVSAAGMGVVVWLVYRLFLYLLRSNLIATLVSIVAGVFTYATLLLMLKGLTEQEILRFPKGRTLVKLARKMHLLRMKRTIGICLFAAVMLFAGGLCGKNAFDAERIRTAEETEAVTEDVAVAQTERTAESMQIQKTCRYLLRMDDDGILKVYEADGITLLFETNIRAERLSVQTREQLSNGIPVDDERELYDLLESYSSMTDIDVTVIGGGAAGLMAAVSAARCGARTRVIEHMDRIGKKILSTGNGKCNYTNAVQGLSCYRGENPAFVLPVFEQFGQEDTVRLFEELGIYPKIKNGYYYPASEQAVSVVEVFGMECDYLGVDLWTSCGLQSIQKTCTGYEIRTTKGAFSTKTVIFAPGLLAAPKTGSDGSAFPYIEALGHHFVDVVPALVQLHGKQAFFKKLAGIRAEMQVTLYLENAQFQPKGSRGTARGEKPDTVCSERGELQLTASGISGIPVFQISRYATRALADEKHPYVLIDFAPDLTDKEFFDLLSERFYENTHGKSAGEALIGLFNRKLSEVLLSEAGIRSELYAGEVARATLHRLVKCVKNFRVDITGSNGMEAAQVCAGGVDTEEIEATTLASKLADGIYFAGEVIDIDGTCGGYNLQWAWSSGFVAGMHAAEEGMSKQRMIRINQIKMPLHHNAAALEQKIRKRLGLSGDQELRYRIIRKSIDARKKPELSLVYSVEVSTSGEEKIIKRANDPNVTIVKQTGYHLPGAVSPTPSIPPVIVGAGPAGLFCAYALTMSGCAPVVLERGRSVTERTKDVERFWESGVLDTVSNVQFGEGGAGTFSDGKLNTLVKDPTGRNRFVLETFVKFGAPEQILYENKPHIGTDILAGVIKNMRQAMEARGARFCFESCMTDYRREADGKMFVEVNHKEWIETSRLVLAIGHSARDTFGMLYQKQDLVMEAKAFAVGFRVEHPQEMMNLQQYGALHAHELPAAPYKVTANLANGRGVYSFCMCPGGYVVNASSEEGRLAVNGMSYSGRDGKNANSAIIVAVTPDDFAGKDPLAGVRFQEMLEERAFAIGKGRIPQQLFGDYCSNRASVSYGAFESATKGACVLGNLRGLLPQALEESFIEGMHAFSRRIPAFDREDAILSGVESRTSSPVRLVRDPKLLVAAGGIYPCGEGAGYAGGIMSAAMDGLKVAEAIMRDMEEQRGMAEFTPMMQQYLQTKEEYKDCILFYRLGDFYEMFFEDAELVSKELELTLTGKNCGMEERAPMCGIPYHAVEGYLNKLVANGHKVAICEQVEDPKLAKGLVRREVIRIVTPGTNLDMQALDESKNNYIMCIVYLADRYGVSIADVSTGDYYVTEVDSERKLFDEITKFSPSEIICNESFYMSGVDIEDLRHRLKITIYALETWYFGDELAETTLLTHFKVKSLEALGLADYDCGMIAAGALLKYLYETQKNDLNNISVIHPYSTGKYMIIDSSTRRNLELVETLREKQKRGSLLWVLDKTKTAMGARLLRSYVEQPLIDKAEIEKRQDAICELNQHVITREELREYLNPIYDLERLITRVTYLTANPRDLIAFRSSIAMLPPIKSLLGDFQCELLGEIREDMDTLEELCALIDRAIMEEPPISVRDGGLIKDGYNEDVDKYRKAKTEGKTWLAELEAKEREKTGIKNLKIKYNKVFGYYLEVTNSYKDLVPDYFMRKQTLANAERYITPELKELEDMILGAEDKLVTLEYDLFCEVRSTIAAEVVRIQRTAKAVAGLDVFVSLALVADQNNYCRPKINENGIIDIKGGRHPVVEKMINNDMFIDNDTYLDNGNHRISIITGPNMAGKSTYMRQTALIVLMAQLGSYVPAASAKIGIVDRIFTRVGASDDLASGQSTFMVEMNEVANILRNATSNSLLILDEIGRGTSTYDGLSIAWAVVEHISNPKLLGAKTLFATHYHELTELEGKLNNVNNYCVAVKEKGDDIVFLRKIVKGGADKSYGIQVAKLAGVPDSVIARAKEIVEELSANDITEVARNISVDTGSKKKKEKLDEVDLTQMSLFDTVRDDDIIEELRNVDVGNLTPIEALNKLYELQNKVKNRWMPQITLLSQETIDKIAAGEVVERPSSVVKELVENAIDARATAVTVEIKEGGTTFVRITDNGCGIEREQVPLAFLRHSTSKIKSVEDLLCIHSLGFRGEALSSIAAVSQVELITKTYSDLTGTRYVIEGSREMSNDEIGAPDGTTFIVRNLFYNTPARKKFLKTAQTEGNYISDLMERLALSHPDVSFKFISNGQTKMHTSGNSNEKDLIYHIYGRDITAALLPVCAETEYFSVKGFVGKPMISRGNRSYESYFINGRYIKSALLSKAVEEAYKGFMMQHQYPFCVLYFTMDTELLDVNVHPTKMELRFSNNEEVYRKLYQTIRDVLTHKEFIPAVPVEEKKEEKRPAITGSLPEPFETKRLHIPPQTQVLPQGQNVTPEPVRTPENLDVFRQLLVREESSYHTDSASAGSASTEDGSRMQEMPREAESIPAADTGQPAKPVDEQPDVRPEPIPKAEVVQGTPDTPENLNTPENLNMPETDTQNVQETQNPQETADTVVYEQQTLEAADTGFFTPDAARRHRIIGEVFDTYWLIEYEDKLFIIDQHAAHEKVLYERTMARVRTQNFASQTLSPPLILTLSAEEQEMLTRYGEQIRLFGYEVEPFGGKEFAITAIPADFEAVDMKGMFLDMLDDFTNISGREAPELILEKVASMSCKAAIKGGDSISRAEAEQLIDELLSLENPYHCPHGRPTIISMSKYEIEKKFKRIVMTMKPNPMVILTGPTAVGKTALSIALAKKINGAIISADSMQVYKYMDIGSAKIMPEEMDGVRHYLVDELEPSDEFHVVRFVEMAKRALKEITANGQIPIVVGGTGFYIQALLYDIDFTEQECDSAYRRQLEELAETRGNHYLHEMLKAVDPASAEAIHENNRKRVIRALEFYHESGERISEHNERESQKTSPYNFAYFVLNDDREKLYRRIDARVDAMVKAGLVDEVARLQQMGCHADMVSMQGLGYKEILAYLNGTSTLEEAIYIIKRESRHFAKRQLTWFRRERDVIWLNKPDFEYDDTKILTYMMDVLQAKGILPAMNQLLQEQYERLGISPEVSAFGEKIEASLKQRFEEIDARAEYNQLKVLKAMQDNRVSAECFNTTSGYGYNDLGRDTLEKVYASCFGGEDALVRPQITCGTHALALALMSNLRPGDELLSPVGKPYDTLEEVIGIRPSKGSLAEYGITYRQVDLLADGEFDYEGIRAAINERTHLVTIQRSKGYAPRKTLSVERIGKLIAFIKDIKPDVICMVDNCYGEFVEEREPIEVGADMIVGSLIKNPGGGLAPIGGYIVGKKECVENAAYRLTSPGLGKEVGASLGILQSFYQGLFLAPTVVSGALKGAIFAANIYEKLGFDVVPDGSESRHDIIQAISFHNPDALIAFCEGIQAAAPVDSYVTPEPWAMPGYDSDVIMAAGAFVQGSSIELSADGPIKPPYAVYFQGGLTWYHAKLGILKSLQKLKERKLVNLDALCMNHHFTTVKELPDSEKPYEKFLISGVESLSDAELIAVIIRSGTRGTRSVEVAQELLRQDGHDLLNLYTLSVQDMQKIPGIGQVKAIQLKCIAELSKRMAKTRYKERICLGDPGSIASYYMEDMRHESRERTMVLLFDAKCRLLEKVMMSVGSATAALVSPREIFLAALDKSAIQIVLMHNHPSGDPSPSAEDDAVTKRVAECGALLGIPLVDHIIIGDRTYYSYRECKRIQMTNNVYGIDLGTCNMKIYCKASNKIMNEKNTIALVNKNEMYAYGDDAYAMYEKAPETIQVTFPVVGGVIADFNNLQVMLQTYLETHAKGKLRGAEFIVAVPTDITDVEKRAFFDMFYKSKLKPKSVLLCEKPIADAVGLGLNVNEPTGIMVVDIGADTTEISVISLGGLVLSDLLHSGGNKIDESIITYVKRKYNLVIGQKTAQSMKETLGSGIPGNTQTMVVVGRDVVSGLPIEMEMSGAVVYEAIKDNLNTICNSIKMILEKTPPELARDIIHSGIYITGGSSQIHDLDQLFRDITGIEINTCEEPEECVVRGLLKIVSDAKFKHLAFSMKNKILLMKRKPKIVLPAKYILLILTVVCVAAMITSFTLNISGGPLNAVAGYVFVPMQRGINTVGAWITEKADNLKNLSDVMSENDALKKQVDELTSELNTNNLEQYELENLRELLALDQKYPSYEKVAANVIGKSSGNWFSYFTIDKGTDDGIEVDMNVIAGSGLVGIVTDVGPNYAKVTSIINDTAQVSGMVTTTSDNLIVNGSLQNMNENMVIEFSNLNDSDNKVAVGDPVVTSYISDKYQQGILIGYISSLSTDSNNLTKSGTITPAVDFEHIEEVLVILDKKQSAGEMRRKVSVFIIITICFLLQTTLFQTLSFASISPNLLIIVVSSFGFMRGKKEGLYIGFACGLLLDIFGSGILGFYALLYMYIGYINGCFRKMFYPEDLKLPMLLIAGSDLGCNLLIYFFLFLFRNRYHFQYYLWNIMLPELVYTMLITIFLYVVILKVNQRLETLEKRSASKFVMFENIKEVFRMFFKSRLAVAAVLMTVLFGVLLWRVFYLQIVKGEKYQDNYTLKIVKERTLNSTRGNIYDRNGELLAYNELAYSITIEDNGSYSSTDKKNESLNAEIAQVITALEKNGDAITDDFKIDRTGEGTYEFNVTGTSLKRFLADVYGESSYDDLGMNKKLGYDTSQATVDQVMDYLRNDCYGIDDSYSDEMAFKITIVRFAMAQNAYQKYIATTIATNVSEESVAYISEHAQELQGVEVMDDTIRKYNNSEYFASILGYTGKISSEEYAKLSETDDSYTTNDVVGKGGIEQYMDSYLKGEKGYEKLYVDYLGKAIEVIDRKESKAGNNLYLSLDSDLQIAVYNLLEQEIAGIVYSNIDNPSSDIPIPITDVYFALINNNVIDLSHFDSTDASTAEQSVSAIFSARQDVVKSQLREQLTGSTLTDFKDLSEEEQDYFTYIIRRLRKNNILADSNIDTSDEVYQQWQQGECSPKDYLNHAIAQNWIDITQFTVDEKYSDSTEIYDALCNYILEELFYEKDFSKIIYEYLITGGQISGTQLCLILFDQGVLPYNEEEIAALNNGSVTAVSFLKEKIQNLEITPAQLALDPCSGSCVVTNTKTGEVLALVTYPGYDSNRLANNVDTEYFNSLQDDKSLPQYNYATQQETAPGSTFKMVTSTAGLAEGSITIGERIRDLGVYENVSNHPKCWIFSSNGGTHGEINVSEALRDSCNYYFYEVGYRLATNNYSTAYNDSLGIEKLQKYASLFGLNERTGIEIEEAAPQIANEFPVMAAIGQSNNNYTTVQLARYVTAVANEGTVYQYTLLNRLEDSDGNVLQTFEPQVRNQIDVLDTEEWNAIHSGMRMVVENTKEFDGFPIEAAGKTGTAQQNLKRPNHALFVGYAPYDDPEISIATRIAYGYTSHNAAKLARNVFAYYFNVENEDELLNGQAANGNSSSNEISDMSQAVIIKSSKNGINLVLDASMPFPELLTEILHKFTEAERFFANASFAISFEGRELSDEEKYQIVDAIMEQTRVKILCILDSDEIRDAVIEQKCREMQQTNEEKEARRQSRGCFYRGSLLPGERLETEESIVIIGDVPQEAVVVSQSDIVVLGELSGSAFAGMSGNTNATITALSFLPEQYNIAGVYGSPMEKAKNSIFSKRNKTTQAKMAFLCDGIINIRSFSMGEVITFTSGKGGVGKTTTTANVGAGLSLLDKKVVLVDTDIGLRNLDVVMGLENRILYNLVDVLTGRCRVKQALIRDKRYPNLRIIPSSCSGDSKNNLNEKQMKNLLSDLRKEFDYVLIDSPAGIDGGFKLATADSDRIIVVTTPQIAAIHDADCVIQLLHRKKVPRIDLLVNGYRRQMVRDGNMLDIPDICELLEAELLGVVLEDEEIIISQNHGEPVIGKHTVSDTCYQNIARRIAGMEVAIPDYLHHKGMFSRFFWRNHAGKLVMCHRSKGVAKERLKLMIDSRRKQLDDETMAQIRHEIGEIVTRYVDIEPENVEIKIILKDYICSNNTNMFKQYKLKNYKFILIALVVILNTIGVALVGSASPGDQKKQIIGMVSGIIIMLLVSYIDYNFILRFSWLIYLGAVGLLGLVIVAGEQSKGAQRWFKIGGFQFQPSELVKILMILFLAYYFMRHEEKINSPRVLFGSFVLIGIPLALILAQPNLSTTIVLALVFAAMLFAAGLSYKIVVGVLAVCVPTFFIVLTLIIQDKFPFIHSYQLGRIMGWLYPDKYPDIAYQQQNSIMAIGSGLLWGKGLGNTDPTSVKNGKFILEPQNDFIFAVAGEEMGFVGTVTIIILLLFITIECIFIARKAKDAAGRLICCGMAALIGFQSIVNICVATGLLPNTGVTLPFVSYGLTSLWSLYIGIGLVLNVGLQPKKYMNIGLIAHDSKKKLMQNFCIAYRGILCKNELYATGTTGRLIEEVTNLNVHKYLAGHLGGVQQLGAQIEHNEIDLVIFLRDPLTPKSHEPDVNTVVRICDTHNIPLATNLATAELLIKSLDRGDLEWREMYKMKCINKWICLSLLIAVSCVSGCGKTSAAIEQPYDVYATAADFGLSSNGTAEAKSYFASDLCVSEDVAIGTDSTDSQVAEGAGTFNLETNTVVYAKNLYERLYPASTTKILTAYIALKYCDDLDAMVTVSENAVNQASDSSVCNLKAGDVIRLRDLLYGLMLRSGNDAAVAIAEYISGDVDSFAALMNQEAAAMGATRSHFVNPNGLPDENHYTCVYDMYLIFSNAIKNDTFVSIIGTTSYDVTYTDASGEAVTHTWENTNQYLTGNATTPDGFQIVGGKTGTTGEAGYCLVLYSYNPSGQPIISIVFKADGKSNLYLLMNEMLQGFAIMIEIISGEKGKGKTKELLTKVNAAVASASGSIVYLDKSQKHMYELSNKIRLINVTDYPIDNCDEFLGFICGIVSQDHDLEEMYLDSFLTIASVETDDEICHAIQKLDIISEKYNVKFVLSVSRNEASLPDCAKAKIVISLMNTNWLDYTLLTLVIIGAINWGLIGFFRFDLVAFIFGNMSWFSRIIYALVGLGGLYLISLFGRIRSVDQAMDMLRRFYSALPDLLFTPGTNPEFIAAKKLFSGAENGRIKMLNLKKGGAFFEMSKNKKVVRYRKPFNVNIGMIIFIIIFIYLIFNIFSYMTTEHISTYEVEQGTMAENNIYRGLILRQEQVYSSDTAGALNVYVKEASRVGYGNLICSVDEGGSVSKKIDEAAGNASNLSAHDLSEIEDSISEFQTSYSAQNFYNVSTFKEDLDSALNESLSLAALDGISDYAAAAQAENTFHTYHADQPGIVVYSTDGYEGVTTDTFQSSMFDEASYDRTDGQRALQVAAGAPLYKLITSEYWSLVIPIGSDLAKRLADDDTLQLRFMKDNTTTYATYTITEKEGSTYLILTLRSGMVRYAKDRYAEVELLLSEETGLKIPNSAITEKEFYTVPKDFFMKGGDSGSLGILVQRSDSSGKAGAEFIAPTIYYETDTDYYIDGEEVGASDIIRKADSTETYQIGSGTARLQGVYNINKGYAIFKQIDILYQNEEYAIVRTGTTYGIALYDHIALDGSKIHENDLINMLKENLKTVEEHVQEACKRAGRSREEVTLIAVSKTKPLEMLQEIYGEGVRDFGENKVQELCDKMEQLPSDIRWHMIGHLQRNKVKYIVGKVALIHSVDTYRLAEEINIQAKKRGIIVPILVEVNIAGEETKFGTTAEDAMLLVEEISKLENVRIRGLMTIAPFVENPEDNRLYFRKIKQLSVDITNKNIDNVSMEILSMGMTGDYEVAIEEGATMVRVGTGIFGARNYKKSNESHMSVLDKFLNVMRLNPDDDDDFYNEDYDYDDDYEEDEPVKSKSSFRKDKRKAEEDDYEEDHSIHEKAVKSSPKVTPIRPVKKQGGSGMEVCVIKPTSVEDAREITETLLNNRTVVLNVEGLDVEIAQRIIDFTSGSCFAISGNLQKISNYIFIITPASVDISGDFLSLVDTFQSTRSVQTDFMNEQDLCQKRLLDLSRQADRKGIVLFSDFLNLNELNIYHQSEKLFATRTECFGGIPCAERQMIAFLPDALYYDWEYPISALKITPAYPKFAEKLGHRDILGSLMQLGIDRCKLGDILVGEQEAYLLCEETVADYFAEHLEKIRHTLVKVEPCSLCDLKITQEFQSQDGIVTSDRIDAVIACVYHLSRSQASLLLRQEKVFVSGKLMQNPSYTCHADDIISVRGYGRFIYRGEYGTTGKGRLKIHYDLYANMAKSIPVKANDSIIYHIELVHDFSMLPAFLQGLGYGHSQKICIVTDSNVAPLYARDVQDLLEKEFDTVILHTFEAGEHNKNLETVNSLYQTLIEQHFDRQDLLVALGGGVVGDLTGFAAATYLRGIDFIQVPTTLLSQVDSSIGGKTGVDFMQYKNMVGAFYQPKLVYMNLSVLQSLPSRQIISGMGEIIKHGLIKDAAYYEWLMAHHDAILALEPAVMEEMIARSCEIKREVVEHDPTEKGERALLNFGHTIGHAIEKLCGFSLYHGECVGLGILAAAYLSKKQGNLTEEQLAGIRQCLSAFGFQTQIDGISTDAVLSATKSDKKMVGNQVKFILLHTIGDAYIYRELSDAQILDGIRYVCRAMKDHSPILKRNLTGCVAAVLLILFDQFTKMLAVAHLKNQPSNVLIDGVFELRYLENRGSAFGMMQNKLIILIPVTVVVTLLILYLFFKKLPATRHFFWLNAVAVLFFAGAIGNFIDRVRQGYVVDFFYFSLINFPIFNVADIYVTAAAFLLIFLCLFYYKEEDFEQIFPSGSSRQHSSEKKDNDMTRETFEAGIAYEGERLDKYLNLIFSETDAAQSRSFFQKLIKEGHVLVNDTAQKANYRLKADDMICVEIPDAVQTPILPENIPLDILYEDDDLLVVNKPKGMVVHPSAGHYTGTLVNAIMYHCRDSLSGINGEIRPGIVHRIDMDTTGSLIVCKNDESHVFIAEQIKEHSVNRRYRGIVYGVVKEEEGTVNAPIGRHPIERKKMAINEKNGKPAITHYKVLERFERYTYMEFKLETGRTHQIRVHMASIGHPLLGDTLYSSGRSPYKLQGQTLHAMTIGFIHPRTREYMEVTAPLPEYFEKILKDLRMGNKIYTIGREFGSGGREIGEKLAERLGIKLYDKELLQQAAKESGFCEEIFENHDEKPTSSFLYSLVMDTYSLNGYHSAPFLDMPLNHKVFLAQFDTIKKIAERESCVIVGRCADYALSDNPDCINIFIHADMDKRVKIISQRANITESKARDLIQKQDKQRASYYNYYTSKKWGDSQSYHLTLDSGKLGIDGCIDMILKFREILDASRMKFVIQRVTEASCTVDGNVTGAIQKGFLVLIGIADTDTTAIADKMIKKLLGLRIFEDADGKTNLSLADVGGSLLLISQFTLYADCRKGNRPSFVRAGKPEMASRMYDYIVARCKEQIPDTGCGIFGADMKISLLNDGPFTILLDSEEICMQSMELKKLLSYTRQAVDDYKLIEEGDHIAVGISGGKDSLTLLYALAGLRRFYPKKFTLTAITVDLGYDSFDLTPINQLCEELKVPYHIVKTEIARILFHGDSVSDKAVKGSPCALCAKMRKGALNEAALELGCNKVAYAHHMDDVIETAFLSMIFEGRFYAFPPSTHLDRTQLVVIRPLLYVSEAEVKGFRNKMKLPVVANPCSADGHTQRAYVKNLIRQINLDHPGAKKQLFHAVLHGNIPGWQTDVAEEKENSIRLMKEKAYYENVNVKNEVKLRKLLEQLPDFCKQFFIGIEPTTSSRTRIAYAYDIGCFFDYLCDVNPICQNYTVKDIPLSLLDELTPMDIEEYLSYLKYYEKNGVEHTNDERGIKRKLASLRSFYRYYFKNDLIKNDPAVKVDMPKIHDKNIIRLDIDEVARLLDEVESGESLTPRQQKYHDRTKTRDLALMTLLLGTGIRVSECVGLDLEDVDMRNNGIKIHRKGGAEVVVYFGEEVREALLAYMVERQKITAEDGSINALFLSLQNRRISVRSVENLVKKYAKLVTSLKHITPHKLRSTYGTSLYRETGDIYLVADVLGHKDVNTTRKHYAAIDDDRRRSAAKYVKLRDVMIKFIYVILMNLFRAPYMIPKMRREADHPEKYSVEERYALARHVIRLMKVTGGIHTKSYGTELLPTEGGYMMYPNHQGKYDALGIIYTHREPCSLVMDKAKSNTILVREFVDLLQGKRLDKKDVRQALTIINEVSEEVKQGKRYILFPEGGYEFNNKNHVCDFKAGSFKIALKTKAPIVPVALIDSYKVFNSFCLGPVTTQVHYLKPILYDEYGGLKTHEIADLVKVRIQEKLDEVLKPAEAPVGMRSRRAAVKAQRRTFMLGLMVLTVIVIGSVLLGTIRTQAAPAEPSYKYYTSIQIQKGDTLWNIADEYITDDYDSMDEYMEEICAINHILPGDIHSGQYLTIPYYSAEHLKMAYGKISTKQREILEYIKQEILNKGYPPAVREICEAVDLKSTSSVHSHLETLEKNGYIRRDPTKPRAIEIIDDNFNLTRREVVNVPILGNVAAGQPLLAVENIETYFPIPTEFLPNAETFMLRVKGESMINVGIFDGDNVLVEKQSTARNGEMVVALVEDSATVKTFYKEDGYIRLQPENDTMDPIIVPDCQILGKVIGIFRFLSMTSQEYCKIAVAALEDRKAEDVKIIDIREISPVADYFVIADGTNQNQIQAMRDACEEALYKAGLKTKQIEGNSSSTWILMDYGDIIVHIFSKEDRLFYDLERIWRDGKIVDVADLMEQHEIRKRLKKELDKGRYEHTKGVMYTAGCMAMAYETSIEQAMLAGLLHDCAKCIPDDEKLQICEEHDIPINAVEYESPFLLHAKLGAYLAETVYEVKDPEILHAIKMHTTGAPDMSTLDKIIYIADYIEPGRNKAADLPRVRKLAFEDLDACMAEILCDTLKYRSRVGGPLDPSTQLAYEFYRQYQKEQTDPVMRKIGILGGSFDPIHQGHLNIARSAYREFALDEVWFIPAGHSPNKEEAEMTPAQVRAEMTQAAIKNDASFKLSRIEIESSGTSYTYKTLQHLKEQFPEDQFFFIMGADSLDYFDKWRHPEIICQNATVLAAVRDTLELPQIEGKIRRIKALFPAEIYPLAGGRTDVSSTAIRAQIRMTGECPAMLPGEVWELIKRYHLYGVSNLGEMELTSKQRAYLGGCASTLDPIFQIGKASLTPEIIQALDEALEKRELIKISVLKNCADDPREIAQVIAERTHSAVVKVIGKKIILFRQAKKNSKFELPAMFADRATIIIKSGKGGDGHVSFRREKYVPDGGPDGGDGGKGGDVIFVVDEGLNTLTDYRHRRKFAAQPGEEGGKRNCHGKNGEDLILKVPEGTVIKDAESGKVIADMSGENRRQVILRGGRGGLGNQHYATSTMQAPKYAQPGGDSIEIEVKLELKVIADVGLVGFPNVGKSTLLSRVTNAQPKIANYHFTTLQPNLGVVDLDGAKGFVIADIPGLIEGASEGVGLGLEFLRHIERTKVMIHMVDAAGTEGRDPVADIIAINKELEAYDPALLKKPQVIAANKMDAVYGDENEIIQKLKDTFEKDGIRVFPISAVSGKGLKELLYCVSELLDQCSKEPVVYEPEFDPALRFFKDEPYTITVADDGAFVVEGPKIEKMLGYTNMDSEKGFLFFQKFMKEQGILKDLEAQGIEDGDTVRMYGFEFDYYKMMNMNLQFFAHKKGVGSTKNGRDSESKRLGAKRADGQFVKAGNILYRQRGTKIHPGVNVGIGGDDTLFALTDGILRFERKGKDKKQASVYPVAEMTKITIFRNHDGEYLGFDCLGHAGYADEGEDIVCAGISALVINTINSIGLFTDEPCETDADEDNGEIRLRFTSPAGHDAGLLMQSLVLGLQGIQNTYGNDYIILNFREVMYAIIATGGKQYKVSEGDIITIEKLGKEAGEKVTFDQVLAVSDNGIKVGSDVANASVEASVVKEGRSKKVIVYKYKRKTGYHKKNGHRQAFTQVKIEKINAMNETFMKEKPILPLLTSMALPMVISMMVNALYNIVDSLFVARINENAMTALSLVFPIQNFVNALAIGFGVGINALIAYFLGAGDKKGADRAATQGLVLALIHGVVVTVLSISIMPAFLDMFTNDVQVYQMGMEYAVIVFAFSTITMANLSFEKIFQSVGRMKVSMIGLLCGSITNIILDPLLIFGIGIFPRLGIAGAAIATAIGQLCTLLLYLTVYNKRPIPVKIRKEYLAFHKETDHRLYSIGVPAILNLALPSLLVSVLNGILAAYSQIYVVILGIYYKLQTFLYLPANGIVQGMRPLIGYNYGAGEQKRVKKIYEITLAMSAVIMALGTILCLVASRGLMELFTENAETIAAGGTALRIISAGFIISSVSVTASGALEGLGKGTQSLVISLFRYVILMIPAAFVLCRIFGPTGVWHAFWITEAVTSVIAAYIYHKAVGSRKMYKIMTPGSTQVKENVRMARSFPCTNPDLDETFVDFYKETCELISRLLHTGNETLILGGEGILGLEAACASLTEPGDPVLVLDNGVYGRGFADFVSMYGGKPVLYSVDEKNPIDPAALEEYLKEHHDYKYATLVHCDTPSGMLNDISALCPLLKKYGILTVVDSVSGMFGEDVRVDDFQIDVLCGGSQKAVSAPPGLTFVTVSDAAWAAIDGRNVPIASFYANLKVFEGYYEKKWFPYTMPISDIYGLRAAFDNIAGDPDMLARHARIGEACRAAVRGAGLNLHLASGFSNTVTVFDVPKETTADAILQTMRQKHGIMLAGSFDSLAGQVIRIGHMGSNANVVDMIETLDALDDTLRELNVPLKGQLRMIFQEEVSQKGLVLMSETKTMSSTKTTSTEQVRFLTVTAIGIALVYVFTWLINIRLPFAPQGGLIHLGNVPLFIFAILFGKKTGAIAGGVGMGLFDLLSGWTAWAPFTFVIVGCMGFVMGWITEKKQGFQWYVVAMLAACAIKIGGYYIAEGIIYGNWITPVTSIPGNLLQIGTAAVIVLIIIAPLKKVAAKLWNMKTVLIVEDEKLIRQGLRKMIQRSGVPVEVIMECNNGETALEILKEQSIDVMFTDIRMPKMDGIELVERMQECEHIPLTVAISGYDDFNYAVAMMHNGVREYLLKPIEREKICDILARLNQEIEEGREQEKTRQKLGQQQIRHLMLLAEMPEEELTMLETQYDQHFILDLSGKPYVVCCRNRKKEEESCPKDCLFLGDVEGNDLFLIEAEALSDRPGEYPFLQEYTGISRPHQGIRELREAYLEAREMRRCAFCTNRSQMRYGQEMPRVPQKLVQEASKLVADEMKLQRVQLLGTDRTEELQHVWTQFFYEVKHGRIDVRDFEECMTDFLTETSKTYRNVLEEKENCGEIKEITDPFGEDAIDRYEQKVLAFVTGLQARILSQFDTNGNQQKMKQAVAYIEEHYASDLNMAVVSNYLSMNYSLFSYSFKQYTGSNFVNYLRDIRMKEAKRLLAGTDMRIAEISQAVGYENEKHFMKLFKSSCGVSPSEYRRNMGLTGMNWKKRFVSQKLNVKFTLVIILFMVIPIGILAGILFYNMEKNVVSENTGYMEYTMERNKDAVATKINSINMSTQFFLSDEPLLEMLKRTKDGETFSAEEWYSFKNSDIVSLERLVNNNPILYGVRVYASNDRVQEMMPILYAASRMEKQPWQSEETVTGWHYDFNDQIFNSYTMRQNRKILSLVTEIKDSDSGTLGMIEAAMTMENMFPSLYENIEDEWSCFLTEDGGCYFGEGDGEDENTGRQELLAEIMAQYTADEEIQTCYLKLQGQHLIVSYLPLQELNGTLLCVKNITSNIHHVYRMRNTFVAVMLVFLVVLTFFINAIVKHLLKQLYEILRAIRRVQGGDLDVVIEHCGPDEMGELGTQINKMLTRIKQLMDDNLKREMLVKNSEIRALQNQINAHFIYNVLESIKMMAEIDEEYDISDAVTSLGKLLRYSMKWVSGNVLVEQELEYIKNYMALINLRFDYEIYLSLNLPEIILQQEIPKMSLQPIVENAIYHGIEQMAEDTNIYIKGRVEGNDCVIEITDAGRGMTEEEMAQLRQKIAGELDSSGGSGNGIGLKNVQDRIQIAFGGAYGIEVASQIGCYTKIIVRIPMTHRGEAEMGGKYKKQWACVTLFSLITAALCGACGNVMTGASGNVPETEAAGQVQPDGDLPAWQTYADDPVTLDWYINYSWFSTPWGENLVSQTITEETGVDIHFITPLGNESEKLNALIASDSLPDLITLGWWEPQVSEMTENGMVYALNELADSYDPYFWEVSDPVAVNWYTTDDGNIYAYPNSSITPQDVEQCEDLSSNQTFLVRKDIYEAIGSPDMTTPEGFCAAVKKAAEMFPEVDGEPLIPIGAHVFDNEGNVSFDKYLMNFLAIPWEKDGVYYDRYTDPEYFRWLKVFRQLGEEGYLANDIFVDTRTQMEEKVAQGRYFCMLYQYSDMLTQQKILYANDPDSIYMAVEGPRNANGDDPLRPTTTINGWTVTLISKNCKHPERAIAFLDYLMSEHGQLLTYLGVEGVTYDIKDGKPVLRDNIKQILDTDRAAYDREYGADDAYWMLQDNVMQLQWKQEPSPATAQLEEWGRKYVVYNGQYDVVFDSGSKEASEEDKITKLWSQTLPALLMAPSEEEFDTLFEEFIEKRDELGYTDVMEKKTAYMNSAKEKLGIQMTTGDKIKKSVIYILLVLLAAACLFPFLLMMVNATRDGVEITHFFTLIPSTHLKENWETVFSFFNLFRGMANSLLVAVPATLLTAYFSAMTAYGLAMYRFRGNKLIFTAILVFMMIPGQLSLIGFYNLCTKLKLVNSYIPLIVPAVAAPGTVFFLRQYILSVMPPALVEAARIDGASELYSFHRIALPIMSPGIATMAIMAFIGNWNNYLLPMIILNKNEKFTLPVMMATLKASTDIQRNQGAIYLAVAISVIPILIVFCFCSKYIISSISAGSVKEMAKTNPKKKTSNLTKYNRAGYFFVAPFVIVFLIFSVYPVFRTLVLSFTDSKLAGMPYHFVGLKNYTRVFTDKFFWRALWNTIRIWGVNIVLQLGLAFLLTVVFSDIKYKFKGLPVFRALYYLPNLIAATSVAFLFKTLLDWRYGTFNQILNSVYQFFGVNKAPVDWLGNSGTAGSVIAVISAWMWFGNSFIMLMAGVQGINKDYFEAAAIDGAGRWTTFGKITLPLLKPIMLYVAITSLIGGLQMFDLPFLMSEKTAASYNSIETVVMYLYKFGFSTGTTQTGYASAIAYALFLIILIVSVLQLKLVNKEDMNWKKAVSVMLVGIMALSMTACGDSGETSTDAASGGGSTAESTEGAGTSASGDDKLVVWTLSNDLIDFGERFEEQTGVAVDTVVIEPANYPTKVQTALLGGESEPDIIVGEPKMLEDFYDAGFFEDLNQAPYNAQDYADQIVDYVWKVGQDSEGIQRAISYQITPAGIYYRRDIAKEVFGTDDPDEVGKLFKDYPTILDTAQKLKDAGYRIFSSDAEMGVFSGDSAWVVDGVLNVDQARFDYMDLCVDLYQKDLTAYANQWSTPWYQAMAGEVPILTADIQNYADDSVNVWDATEFAEATKGMDTTTVFAFGLPSWGVLTMRDNVGDTSGLWGVCKGPSSGFDGGTYIGISSQSNRKDTAWEFVKFCTLNEDTADWWIDFSQGDTVSLKSALEKHKDDENAIYGGEKLYQFWLEQAKEIDTSKVTRYDQAIGDAWGNAISAVKTGQMTKEEAVNDFYDTIESTYPDITVNRMTGKNETFVMNDYGKKSTFASFLPGIAGIRGIPIWCYYVNRGQCVVSFGVDNKDHAIMEFYPAHQAYQNVKTTGFRTFLKKNGTVFEPFSDENIAHRMQIHMNGLAIEEQNRSSGMDTKVVYYTLPGENVGALVRVVSVTNQSGEPIELELIDGMPAVIPYGVSMDSMKNMGQTAKAWMQVEDLSEGLPYYRVRASMDDTAAVRRIDGGNFSACCEADGRRLQPIVDPSLIFSYDLSLKRPVGFEERPLKELLLEEQMTQNLLPCSFYGITRTLAPGGSVTLYELIGQVENKQLLKEYFAEKKDAAYFEAKKREADELAEALTDGIRTRTASAAFDAYCRYTYMDNVLRGGYPMQLGNNKIFYVYSRKHGDLERDYNYFSMLPEFYSQGNGNFRDVNQNRRCDTFFAPFVGRKNIQEFYSLIQLDGYNPLGVEKLTYRLSKERAKKLLADVKEEQRRALLDFATKPFTPGALCRKFGEVFGDTWDETLFIRVIDFAEEMVNGSFGEGYWSDHWTYNLDLILDYLSVFPEQEEEMLYEEVYTTFLSRINVNRRFRRYVETENGLRQYRALNEASRRADLGEKLVRTEYGSGDVLTMTLMEKLILLSAVKFATLDAYGMGIEMEGGKPGWYDALNGMPGLFGSSMAETYELARMLSYTIEALKQYPGEVALIEELGCFLDELNLITRLEHDNIMRDEELLSFWNRINDAKEIYRDKTYQGVSGKKMVYHTEQLAAILEGFLEIVTCGIKKARRISGEICPTYFTYEVPEYEKLKDGGIRPLKFVPKNMPYFLEGPVRYLKLPVEQGEKRALYEAVKESDLYDGELSMYKVNASLADSSFELGRARAFTPGWLENESIWLHMEYKYLLELLRSGLYEEFFADFKKAAIPFQNPETYGRSIYENSSFIASSRNPNPSCRGRGFVARLSGSTIEFISMWKEMMFGAHPFRTEQEELVFSLAPAIPAYLIPEDGRLSAAFMSKTTVCYEFGGYRDYVPGTYRIRHMVFFYENGSQATVEGEKVSGKLAEDIRAGRVRKMEVAVDMQNTYQFISDKGVFSLPGAADYSDLYFPVAGECGIKSAVTPTLGGDCKLDQNTFLLEPVSVENLHNNRNARNFWCHIGTHGSWSATGNSAEEIAKKFTDLTDENEVTAGFMWQTVTRTSRKYQLSAQITSFVPLDDPMEIMYVEITNTGNMQVRFTPTAAIPVYGRSADNLRDHRHVTSLLHRIRTVENGVLVTPTMSFDERGHRPNEMTYFVCGYDQTGEAPEDFYPTVQDFIGEGGNFERPKAVVKNLAGVPAGSAYAGCEAVGGLHFKERILAPGETAGYTIMIGAVRKTEYAGETILSMTAAYRTAAQTKAAYERMKTYWEQKVNVSYHTKDRQFDRYMQWVSFQPILRRIYGCSFLPHHDYGKGGRGWRDLWQDCLALLLMNPDGVREMLLNNFQGVRIDGTNATIIGSKEGTFIADRNQITRVWMDHGVWPFVTTKLYIDQTGDLAVLEEEIPYFKDQQAGRGTKKDAAWKEQDGCWQRDAAGNVYRGSVLEHLLLQNLTAFYEVGEHGHIRLRGADWNDALDMAGERGESVAFTNAYAGNLRELAELLALYAEKTGKESVPLNRDLFVLLADDDTLYASVQKKQELLTRYTDACIHEVSGQKTEVSITELVRSLQKKAAFLTGHIRATEWVNDEEGNGWFNGYYDNHGRCVEGVFAQGVRMMLTSQVFAVMAQTATDEQVAEIVRSADKYLYCDAMGGYRLNTDFGEVKMDLGRMFGFAYGEKENGAVFSHMAVMFANALYKRGFVKEGHRALDALYRQSVHFETSRIYPGIPEYFNSRGKGMYHYLTGAASWYMLTVITEMFGAKGCAGNLMLEPKLERQQFDLDERAELFFSFAGQSLHLVYENKEHKEYGAYRPGTIRIDGELWDYSGGEKETRSVCIDRERLKQLDFDVTHEILVELVMNRYMITREKIKGQEYLISALYDEKKHMIEVLPEAAGETSLLGNIYVGKVENIVTNLNAAFVKIAPDIRCYLPLSDVKNPVFTRKLSQTKALAAGDELLVQVSREALKTKDPAVTTNLTIAGTYAVLTSGNRKKSVSSKVKGEVRERLVKLVEQTAGEYGVILRTNAAEASDEAVLLELEVLSERYETMAEAAAHKNCYTLVYREEAGWLRHIRDLRKDDLEEIVTDDRGMFEDICSACRIHKQALTTGGSVPVPVDDVMTADGIRIRYYKDPALSLGALYSVRSELKNALSERVWLKSGAYLVIQPTEALTVVDVNTGKNVAKKEMQENFLRVNKEAAEEIARQLRLRNLSGMVLVDFINLTSKSAEEELLKTFRAALQKDPVPAQLIDMTALGLVEVTRKKIKRPLHEIFPDGLGFMKIRIRFRKYGVMKFIGHLDVMRYFQKAMRRAHIDICYSEGFSPHQIMSFAAPLGVGITSDGEYMDIEVHTSASTEESLRALNGVMVEGVECTGYVKLPDQAKTAMSIVAAADYDLYFKEGYAAPVSVLAFADGIRDFFEKPDEVLITKQTKKSERVLDIKPLIYGFQVTDRGGVPSFYLKLSTGSTDNLKPELVLEALFLHMGLTYDPNAIQIHRKDVYASDGDDFVSLGAMGEVIEMTKLALSDEILMKIDKPARYIGNELNSVCKNKDEVSIRFAMCFPDVYEIGMSHLGIQILYDMFNKRDDVWCERVYSPWPDLHKIMKEENIPLFCLESQEPVKNMDFLGITIQYEMCYTNILQILDLSQIPLLAADRDDTVPIVIGGGPCTYNPEPIADFFDLFYMGEGEVVYDRMLDLYQEMKRAGRSRREFLHEAAKIPGIYVPSLYQVEYKEDGTIASFTPVDEEIPATVTKQLVMDMTDAVYPEKPVVPFIKATQDRVVLEIQRGCIRGCRFCQAGMVYRPVREKNIERLKALATQMIEATGYEEISLSSLSSSDYSSLEELVNFLIDECRERRVNISLPSLRIDAFSLDVMSKVQDIKKSSLTFAPEAGSQRLRDVINKGLTEEVILNGAQMAFEGGWNKVKFYFMLGLPTETEADMRAIAELANETAARYYDTVPKEKRNGRCQITISTSFFVPKPFTPFQWARMYPPEDYIGRAKVVNDTVKEQLNKKSIKYNWHEADVTVLEGVLARGDRKIGQAILKVYEKGGIFDAWSEYFDYQRWLDAFAECGIDPDFYTMRERSMDEIFPWDFIDTGVTKEFLKREWNNAMKETVTPNCRMRCSGCGVKKFGGGVCYENMTDYVERRRAYVSQVRSSFETGADAGEPFDREEPQRGRAGGQLRFLVALLLFLFFFAWDDSGNTVCGVTPAKMIDMIEDNRYDTILQECDAVLAELLHTEMDVLRVIATVFVICVHTVALAKTTAAPGTLLFRVLEVFNYTFLSCNLFFVMISGALLLPVKGERCRDFFARRFIRVFIPLVVYYNLYVCAKEGIGRLAPSQWGLMLQRFFIGPPVEAPHLWLVYVIIWLYVLTPFLRYLVQNIPDPVMNGVMLVIFLLNAYVTYVPLLGVTPPAALSGIVNSYAGAFLLGYYLANRAGRRAENFFLAAGLVSYLITCYVILFHGWYDDYIYNNAPTMMFYAAAVFVLIKRLVPCGSKESPFVRIIGKYSYSILLIHWGVLHYAVKQVLHVNVLSGGIVGGCLLAVLLTFALSFVGAVILDQTIIRFLTFAVSKLIDVLRTCFSQKSHIVSMEQKNIVATIYLKNGQAVRGIEDHTPLADVIELAKLYNDNGIDKIIIFDLSDDDEEHEKNIHTIKNINRNVEIKTCAGGNINRLEDIKKFIYAGCLQVIVNGAKANSIELAEEASKRFGKDRILVSVENVDFVFKHQAKMNENFHELLVLNTSVLDAIENITDVPYVVYFETCDYEKIIEVLKRSNTRGIAGGFLNDPNTNIMEIKSQLSSAGIKMDNFDPALKWDDLKKNSEGMVPVIVQDYRTDEVLMLAYMNEEAFYTTINIGKMTYFSRSRQELWTKGMTSGHIQYVKSLTADCDYDTILAKVSQVGAACHTGNPTCFFNEIVKKEYVEKNPLKVLEDVYEIILDRKAHPKEGSYTNYLFDKGIDKILKKVGEEATEIVIAAKNPDPEEVKYEISDFLYHMMVLMAERGVTWEDITQELSQRMSRTADYVRKTKETDITLSLELDGSGVSEIDTGIGFFDHMLEGFARHGFFDLSVKAEGDLIVDCHHTIEDTGIVLGNAIKKAVGDKKGIKRYGSCILPMDETLVLCAVDLSGRPYLSFDGNFTVERVGYMDTEMVKEFFYAISYTAGMNLHIKVLTPGNNHHMIEAMFKAFARALDEATSYDPRITDILSTKGSLMRILTLTKETQQNILENLLKRSPNSYGEYEGRVNAIIEEVRANRDAAVFSYTKKFDGADIDAGNILVTEEEIREAYEKVDPKLLSVIRKALVNIRDYHSRQRQNSWFDSQESGIILGQKVTPLARVGVYVPGGKAVYPSSVLMNVIPAKVAGVEQIIMTTPPGADGKVYPSTLVAAKEAGVDAIYKVGGAQAIAAMAFGTESIPKVDKIVGPGNIYVALAKKAVFGYVSIDSIAGPSEILVLADETANPRYVAADLLSQAEHDEMASAILITTSRTLAGQVAAEIDRFVEKLSRKEIITKSLENYGYILVADSLDDAIATVNEIASEHLELVTKNPFEVMTKIRNAGAIFIGEYSSEPLGDYFAGPNHVLPTNGTAKFFSALGVDDFIKKSSIISYSREALENVYKDIIQFAECEKLTAHANSIRVRFEENSEQKMEDMRYLTFALGKGRLAKKTLELFEKIGITCEEMKDKDTRKLIFVNEELKLRFFLAKGPDVPTYVEYGAADIGIVGKDTILEEGRNIYEVLDLGFGKCRMCICGPKDAEELLKHHELIRVATKYPHIAKDYFYNKKHQTVEIIKLNGSIELAPIVGLSEVICDIVETGSTLRENGLVVLEEVCPLSARMVVNQVSMKMENERITKLIADLKREIERKDLAMKRQLLHTPEGVRDIYNDECEKKMLLQDQLYHILRLHGYHPIQTPTFEFFDIFGREIGTTPSKDLYKFFDREGNTLVLRPDITPSIARCAAKYFGEEELPIRLCYMGNTFINNSSYQGRLKECTQLGAELLGDSSVDADAEMISMVISCLKAAGLKEFQLSIGHADFFRGLMEAAGLLEEQEEELRELISNKNFFGVEEFVETLNLEENLKNLFGMLGNLYTGSDELSAARECAASYPRILKAIGDLEELHKILEVYEVSRYVSFELGTISNYQYYTGIIFAGYTFGSGEAIVKGGRYDRLLTCFGKDSASIGFAFVIDQLMAALQRQKIDVPVERCVELMVYKSAKRQKAITAAATARAAGRCVELMLWDETKQRKDYEDYAARSRMTNVQFFAMTAANCRCVKRVSGGNMATWNSRGLRGSTLEEFINRTNEIYQENGLALIQKIPTPITPINIDKQTRHITLAYFDQKSTVDYIGAVQGIPVCFDAKECNTDTFPLANIHEHQVAFMENFEKQGGVSFFLLSFTKRDEFYYLRLDMLLEFWKRAKEGGRKSFRYEELDPEYFLPRQRGVLVPYLDALQKDLLRRDMVMNESNENYLETILVLNHRLGNVRSVDIANEMNFKKPSVSVAMKNLRENGYITVSPEGYIHLTESGLEVAEKIYERHTILSNWLTMLGVDPRVAAEDACKIEHDVSAESFEAIKRHINSSAGKIMQELHIGENDAGQRFDKYLKKLLAEAPGSFVYKMLRKKNITLNSKKADGTEKLSCGDEVKLFLSDETYEKFRAKSKTVMPEAFSGSEKTLRQLKVLYEDADILIINKPSGMLSQKARPEDVSANEYILSYLLREGALTEEEMRTFRPSVCNRLDRNTSGILIAGKTLKGLQEMSKALKERTIQKYYRCVVKGEVLREDYLKGWLVKDERENKVTVSTVKPKSADAAPIETAYRPIWTGGGYTGLEVHLITGRSHQIRAHLASIGHPIIGDVKYGDAGTNEQFRRQCKVKSQMLHAYRIVFADGREVIAPCGAEFARVEEWCKNRMNNGFLPVSRAEMEERGIKQFDFVYVIGDAYVDHPSFGHAIISRLLEAHGYSVGIISQPDWRDKESVCIFGEPRLGFLVSAGNMDSMVNHYSVSKKRRATDAFTPGGVMGKRPDYATIVYCNLLRQTYKHTPIIIGGIEASLRRLAHYDYWSNKMKRSILLDSGADLISYGMGEHSIVEIADALNSGLAVSDITFIDGTVYKTRKREDIYDAIELPHYEEVLADKAAYARSFYTQYCNTDPFVAKRLFETYDGKLFVVQNPPAKPLTQSEMDQVYALPYQRTYHPSYEAQGGVPAIEEVRFSLVSNRGCYGGCSFCALTFHQGRIIQVRSHESILAEAEKIVWEPDFKGYIHDVGGPTANFRAPACDKQMTKGVCPNKQCLFPTPCKNLKVDHKDYLKLLRKLRELPNVKKVFIRSGIRFDYLIYDEDRTFLRELCEHHVSGQLKVAPEHISDAVLEKMGKPRVEVYKRFVKAYQDMNEKLGKKQYLVPYLMSSHPGSTLKEAVELAEFLRDLGYMPEQVQDFYPTPSTISTCMYYTGLDPRTMQPVYVAVNPHEKAMQRALIQYRNPKNYDLVVEALTKAGRTDLIGFDKHCLVRPRGIGYGRTNVKDRYAGGDKNRRTAGGGNNRGRANASEKKNTKKTIRNVHHKKAGAGKKMALRLDKYLTELGAGTRSEVKKQIKAGLVTVNGAVAKKPEQKVDETGDEVCLRGERLLYTAFEYYLFHKPAGCVSATQDNMHRTVMDYLSDTARGDLFPVGRLDLDTEGLLLITNDGALAHALLSPSRHVAKTYYARVQGVVDETDVNFFKNGVDIGEEKPTRPADLVILGCKEDVSEITLTITEGKFHQVKRMFEAVGKKVLYLKRISMGPLVLPEDLAPGAYRKLTAEELAALKNEMNFRHVRMLLLLFTMILWNVLLNAWILERTRQINCFSYETALYSFREHRVSGELLARMQEEAEEKGMSEKELLAVYFAEDGSVTDPGQLAVEALYAKRYQPQAYARICGYLSAVWDDLERFPVGTVASDGNAGVSFADSWMQSRNFGGERGHEGCDIMASVNERGIYPIYSVSDGVVENVGWLRLGGYRIGIRSPSGAYFYYAHLAEYAKEFEVGETVLAGTHLGYMGDTGYSDIPGTTGNFPVHLHFGIYINDENGQELSVNPYPMVLYLWEQQGKYTFGETKRQMSSLKEIQALQLQSEKVFDYFEEICAIPHGSRNTKAISDYLVAFAKKHDLTWYQDESNNVVIVQEATAGYEQADTIILQGHMDMVCEKENGCAIDFEKDGLDLYVDGDFLKARGTTLGGDDGIAVAYALAIMDSPEIAHPRLEVVITVDEEIGMLGAEAIDLSMLKGHKLLNIDSDVEGHFLTSCAGGMTVETTIPVDRMSQNGLAVTLTVTGLCGGHSGSEIDKEHANANMVMGRVLKYVSDRMELGVVTLEGGLKDNAIPRECTAGLLIPEEKKEELTTYIKELTAELKKEYAVSDAGITIDCAFGEKGEASILSYTAMARVIFYLRHVPNGVQHMSTVMPGLVETSLNLGILKLEDQALLATSSVRSSVSSRKEDLRDRLEHIAEFLGGEIAVSGDYPAWEYQAKSEIRDTISAVYEELFQEEPVFEAIHAGLECGILSGKIKELDCVSFGPNNYDIHTPKERLSISSTEKVWKLLVAFLKKCKMKKKLIFLCLLLFIAYILTAPKDAVNAASVGLVLWYTRVLPTLLPFVILSNILMDSNYLQYLNKITAPLVSRLIPVSDNGAFVLLSGFLFGFPIGSKNCAALLASGKITRREADVLFIITNNISPVFVTSFILYTQLGLSHLSAVTLLILYFPTLLLGSILLSADARRTKDRTAFHAQKQPASGSQMNFKIIDTGIMDGFETLTRLGGYIMLFSMIASLLQKLPVPRVVTLILTGMVEITNGIAMLPDSGLPQSVQYVLAVVYTAFGGLSGIAQTSSMIRDTPLSIKRYCIAKLLLAACCGLLACLVSQIFHLMASRIEQIIEEIEEYIDGCKPQTFSSSKIIVNREEMEELLNELRIKTPEEIKRYQKIISNKEAILADAQAKADAIIAQAQVKTDELVSEHQIMQQAYAQANEVVMIATKQAQEILDNATNDANNIRMGAMQYTDDILRNLENTISHSMDAAKARHDAYVSSLQGFLDVVTANRAELNPTAEEPETKTTDAQASQVDGPKVEISSDMLGMKRAIYPGSFDPLTLGHLDMIKRSAKIVDELVVGVLNNSAKNSLFSLDERVSMIKEMTESMPNVTVASFDGLLVDYMKEINATIIVRGLRAVTDFEYELQIAQTNHVENPEVETIFLTTSLQYSYLSSTIVKEFASYGGDISKFVPARFIDRIYEKYHISKMRIIAGTARSLPLKAPEGMDTRPTTDRIKETLFNIIQDEVPGAYFLDLFAGSGQMGLEAVSRGARYAVFVDNGKKPAACIEENIRFTKFEHQTKLYPTEVLSALRAMEGKYQFDLIFMDPPYRKGMEQEVLRYLAGSSLLKEDTVLIVEAALDTDFSYLDEYGMTLSRLKMYKTNEHAFIRRKMAAEGQNGSKMLDEMSEYRIFELLKKYHYTLTTAESATGGMIASTLINVPGISAFFTEGYVTYSNEAKVKMIHVKPETIERYGVVSAETAADMAVSAARTADTDAALSVTGVAGPDGGTRECPVGLVYIGCCLHGRVVTERHLFAGDRMQVRKSATDAALHLLARTITEEGTICESMNLPNKLTIMRVILIPFFVFFLLSPYFPAYGNYIAVAIFIVASLTDMLDGKIARKYNLVTNFGKFMDPLADKLLVCSAMICLIELDRLAAWIVIVIIAREFIISGFRLVASDNGVVIAASYWGKFKTTFQMLMVIVLILDIQMPFFQILGTVLTYVALILTVVSLIDYIVKNKDVLKDQKMKLLFISLGCDKNLVDTEFMLGMIRDAGTFDGQPIEMTDDEYQADIIIINTCCFINDAKEESINTILEMAEHKRDAKLKALIVTGCLAQRYKEEIRKEIPEVDAILGTNSYEDIVNAITEALGGKFYENFETLEGLPKLTAKRSVTTGGHFAYLKIAEGCNKRCTYCIIPYIRGNYRSVPMEELVAQAKELVAAGAKELILVAQETTLYGVDLYGEKSLHKLLDALNEIPGLFWIRIMYCYPEEIYEELIDAIARNEKVCHYLDLPIQHANDTMLKRMGRRTSNADLVRIITHLRERIPDITLRTTLICGFPGETKEMHEELMQFINDMEFDRLGAFTYSPEEGTPAAEFPDQIDEETKNEWQADVMELQEEIIFDKNEEMKGRELYVFIEGKVSDENAYIGRTYRDAPDVDGYIFINTDEELMTGDIVRARVTGAYEYDLIGELLMIHPSYVELMKVVNEGVEIGEEPVVNSRYSLVIAAAKRARQIIAGDEPMADKVTCPKPLSIAVEELYEGKVKIIPESQSEEEMQKNKGILTVVSGFSGAGKGTIMKALMQAHSETYALSISATTRAPRTGERDGIEYFFKSREAFEQMIADDALVEYAEYVGNYYGTPKAYVEEQLARGKDVILEIEIQGALKVRRQFPDALLLFVTPPSAEVLKNRLIGRGTETMDVIEHRLARALEEAEGLEEYDYLVVNDVLEEAVREVHEIIQNEHYRVARNADKIREMRNELKGFTRQMAGLINIGFGNMVNTDKIISIISSDSAPAKRLIQRGKETETLIDATQGRRTKSVIFTENNKIILSALQPETLAGRFNGNTAEDYDDAKEMIKSMTGFGRAEVADASRKFTVEIKSVNHRYLDVNIKLPKTLNFFESAIRSLLKEYIERGKVDVFISYEDYTEENYSLKYNAGLAEQYMTYLKEMAEQFGIENDVRVSTLSHYPDVFVMEEQSPDEQKLWAGLEQALRQAAAQFVESRIKEGERLRTDLVEKLDGMISYVDYIEERSPQILDEYRMRLESKVQELLGDRQLDDARIAAEITIFADKICVDEETVRLRSHILSMKETLLAGGGMGRKLDFIAQEMNREANTILSKTTDLKVSDVGINLKTDIEKVREQIQNIEMEKEMTGADRRKKLIFLMRESEQPLSGTQLGQVTGVSRQVVVQDIALLRTEGYPIVSTAKGYLLNEPKCATRVLKVCHTNEQVEEELTTIVDLGGTVLNVMVNHRVYGRVEAALNIRNRRDVQGFLNDLRTGKSVPLLNVTSGYHFHKISAESEEVLDEIEHALQKKGFLAEVMPYEQETHAMNPITMQLVADKYIKMALEEDINSEDVSTNAVMPEYKKGDVQLICKEDGIIAGLQIFERVFTLLDEKTQVEFFVKDGEKVKKGQTLAVVTGDIRVLLSGERTALNYLQRLSGIATYTHSVAKLLEGSKTKLLDTRKTTPGMRIFEKYAVRIGGGCNHRYNLSDGVLLKDNHIDAAGGVKEAVAAAKAYAPFVRKIEVETENLDMVKEAVEAGADIIMLDNMTPEQMAEAIRVIDGRAETECSGNITKENIKTITSLGVDYVSSGALTHSAPILDISLKHLRVLEGMRDMYYDVVIAGCGVAGLYTALRLGRDKKILMLSKEDLESCDSMLAQGGICVLHDENDYDSYFEDTMRAGHYENRKESVDLMIRGSRAIIDDLLSLGVRFAKNPDGTLAYTREGAHSRPRICFHEDITGKEITTTLLSHVKKLTNVTIMEYTVMTDILVVNDHCCGMIAKTRDGETLHIHAQDTVMATGGIGGLYEHSTNFPILTGDACRIAEQHGVELEHMDYVQIHPTCLYSKKPGRSFLISESARGEGAILLNHKGERFVNELLPRDVVTKAIREEMEKEGVDHEFISFENVPEEIIKGHFPHIYEKCLEEGYDILKEPAPIVPAQHYFMGGVHVDRDSETTMPHLYAVGETSCNGVHGKNRLASNSLLESLVFAKRAAQKIELTQKGKEEHESNYHAACCMINEDTIYLLRECNAGTQMAVYSIGEILENVKDQKLREILISSKNHHEQLGNELHILLQKYGDTTKDPGVIAKGMSWIKTNAKLAIDDSDRVCADLITDGCHMGTKTMQRHINQYLAADREARGKAEELIRMEELLACELKPFLMITAAESLEYYTIKETGGMVFVKQVEVLLNAPERALRFCNILSACEGPFDLGRGSYTVDGKSILGICTMDLTVPLTLSIYDETENVLEKIREFLVMARELPKRSEVKEEYTWDVSAMYASKAAWEADLKEVVTIVSDLAKLEGSVMASAEKLLTALELGARAEQKIDLAFNYAERLFDQDQKNTEHQAMSQKMYGVVTDYQSRTAFVVPEILAADKATLAQYFAEKKELELYRGLVDEILRTKEHVLSAEMEKLVAMTGEMAQTPEQVYSIINNADLIYPEIEDENGEKVRLSHGNFVPFEESGDRRVRKDAFEAFYSIYKQFAGTIAGLYNGQVKQQIFYAKARNYASTLEAAVDANNVPSKVYRNLVETVNANMDKMHRYVKLRKKCLGVDELHMYDVYTPMIADAAKKVSYDEAKETVLKALAPLGEDYVATVKEGFENRWIDVYENEGKRSGAYSAGAFGTHPYVLLNYNDTLDNMFTLAHEMGHAMHSWYSNANQPYIYSQYKIFVAEVASTCNEILLMEYLLANTTDKKERAYLLNHYLDSFKGTVYRQTMFAEFEMKSNQMAEEGESLNAENLCKLYYELNQKYFGEDMVSDPQIAYEWARIPHFYYNFYVYQYATSFSAAVAIAHGILEEGAPAVERYKKFLSGGCSMSPVDLLKQVGINMEEPKPIQDALDVFGKVLDEIETLIMAFDGFVISNLVYELNNTILNAKISKIAQPETDELLFTLKGSNGQYRLAMSASASLPFLYLTGTNKPSPLTAPNFCMLLRKHIANGRIVEISQPHMERIINFKIEHLDEMGDLCQKTLIVELMGKRSNIIFCDANGRIIDSIKHVSAAMSSLREVLPGRTYCIPATQDDRLNPLEVTEETFLGSAMKKPLPIAKALYTSFTGVSPLVANEICHRASIDGDMSVDSLTPDAQKHLYHNFAWLMENVKEHRYEPNIITRDREPVEFSCFRLTEYVGSDDAAEATNSTGAAANGSEYTMQHFSSISAVLEQYYASRNVYTRIRQKSVDLRRIVATALDRSRKKYQLQEKQLKDTEKRDRYKVYGELIHTYGYGLAEGAKELEALNYYTNEMIKIPLDPMLDAKANAQKYFDKYNKLKRTYEALTDLTAETRAEIEHLESIATSLDIALTEDDLVQIKEELIEYGYIRRKRTDKKAKSKSKPFHYRSSDGYDIYVGKNNYQNEELTFKFATGNDWWFHAKGMPGSHVIVKSGNDELPDRVFEEAGKLAGYYSKGRDNDKIEIDYLQKKNVKKPNGSAPGFVVYYTNYSLTIHPDISGLTLIEMDKIEIYIDELLEKSTPDRPIWNIEKILQGLKSTWNYIDGCMIKAILEMYAITKDEKYFRFADNFIDCKVREDGSIEGYSVEELNIDNVNAGKTLFELYDLTGKEKYRKAIDLVYSQIEQMPRTAEGNFWHKNIYPNQVWLDGLYMCQPFYMEYETRFHEKKNYDDIFRQFFNVVEHMRDPKTGLYYHAYDSSREMFWCDKVTGLSQNFWLRALGWYSMALLDTLDKADASVGEPYERLKKVFVDLMDAMLKYQDASGMWYQVVNFGGMEKNYLETSGSSIMAYALLKGVRLGFLPENYQTYGAKAFHGICEKYLSEDADGSLHLDGICLVAGLGGKQMRSGTYDYYMSEPVVKDDAKGVGPFLLAYTEMRRAGLIEAMKKKKTRNPLIRRIPRELAGDWRKYLLVSLFLILTIGFVSGMYVANESMMKAADEGVTKYKLEDGHFELNEEADQTLLAAIATGEKADVKQYYTDKAKRELDEKFDGEFEDKFKDEFDSQFKEEFDRKFNAEFQTQFDQTFATQVKQTLLAQGMDETMAAAMLDTAVAQAKQAGSYQQVYDAAYESAYQKAYDTAYDEAYGKAHDEAYEKAYDEAWDKILDEIDEKYQKAEDKYELNDPDFAAVPVNISENFYRNEEEDHDGDGTSDGTVRVYQKTDDINLACLMEGSFPASSDEIVVDRMHADNVGIAVGDTITVQGEAYRVVGLIAYVNYATLHEKSTDLMFDALKFNVAMVTEDGFARLHEKVHYDYAWNYVTEPADEAAEKNLSDDFMKALLTQVVVADAELEDYVPEYANPAIHFATDDMGSDEAMGGVLLDILIVIIAFIFAITISNTIARESSTIGTLRASGYTRGELVAHYLSMPVIVTLVAALIGNILGYTVFKNVVVSMYYNSYSLPTYETIWNPDAFIKTTLIPLILMFVVNLVVIARMMRHTPLQFLRHDLKKTKCKKAMRLPRFQFLSRFRLRVMFQNMANYAVLFVGIFFCMVMLAMAVGMPDTLGYYKENAKDLMFAKYQYMLASWEDEDGDIITTKEPDAEKFSMTSLLRKSDTLDEEVSVYGISDNSQYVKIDDLNHLKENEAYISASYADKYDVDVGDEITLDEKYENQQYTFRVAGIFDKSQSIAVFLPIENYREVFEQDADAFGGYFSDTEITDIAEENIATVITEQDITKMCDQLDHSMGSYMSYFQILCILLSAVLIYLLTKIIIEKNETAISMTKILGYENREIASIYLLSTTIVVIVADAICVVLGALVMNAAWKVIMYSYSGWFSFVILPAGYVKMFAFVLIGYLIVMVFDFMRIRKIPMDQALKNVEMGMFRKEEIMSEEEKKFLEIVDLKKGFGSGETRQEVLRGMNFSVAKGEFCVLLGPSGSGKSTLLNIIGGIDSADSGYISIGGDKLEEMSEKKLTQYRRKHLGYVFQMYNLIGNLNVKENIEVGAYLSDHALDIDELLHTLGLYEHRYKLPNQLSGGQQQRVSIGRAIVKNPDILLCDEPTGALDYHTSKEILKLIEDVNIKYGNTVIMVTHNEAIRHMADHVIKLRDGEVRHNEINTDKVSAADLEWMANRSSNRAAIPEAKSALDRFKYEVASEIGVPLKDGYNGDLTSRQNGSVGGYMVKKMIEAQEKQMAGKMNQSTSIIEIKGIGEKTAALFQKLNIETVGDLLLHYPRTYVQFPVAKEVAEVTDGETAAVLGRVRKTPVVRRTRSMPVTVTTIGTDEAELELVWFRMPYIKSQLAPGNTYVFYGKVARKGSRLVMEQAAIYSGESYAAMEQAFLPVYGLTGGISNNLVTKTVRSVLGREELFKEYLPREIRSRYKLCEYNYAIKEIHFPENMDTLIAARNRLVFDEFFLFILNMQYHKEKRIKEANEFEFREDSFTDELIARLPYELTGAQKRALSEVKRDMRSPYVMQRLIQGDVGSGKTIIAFLAMADAAHNDYQSAIMAPTEVLARQHYETFQKLCEEFGLKIPVVLLTGSMTARQKRMAYEALQLYPNAMVVGTHALIQERAIYDNLALVITDEQHRFGVRQREIFAEKGRHPHILVMSATPIPRTLAIILYGDLDISVVDEVPAKRLPVKNCVVNTGYRNKAYAFIENEVKNGHQAYVICPLVEEVEGMETENATDYVKKLRQIFPEEIQLGLLHGQMKPAQKNKVMEAFMKNEVQVLVATTVVEVGVNVPNATVMMIENAERFGLAQLHQLRGRVGRGDAQSYCIMVNCSSAKTAERRLKILNDSNDGFRIASEDLKLRGPGDFFGIRQSGELQFALGDIYQDAAVLRDASEAVGELLAEDPDLIFGEHENLRHYLEAFLMREQNQMSLMEITTINAEALAKAFLAGAKNLEAKKEWINELNVFPVPDGDTGTNMSMTIMSAAKEVAAMAEPDMKSLAKAISSGSLRGARGNSGVILSQLFRGFTKVIAEYDEIDVQVLSDAFEKAVETAYKAVMKPKEGTILTVAKGMAVRAVELSEEETTDLLAFCEEVIKEGDHVLSMTPDMLPVLKQAGVVDSGGQGLMQVMKGALDSLQGKEIDYSIETPEKQPAAETGSASYNIDAQAAQEIKFAYCTQFLIMLEKPISTRQETEFKEYLESIGDSIVVVADDEIVKVHVHTNDPGLAMQRGLTYGSLTTIIIENMKLERDEKISALKEKEMQSETIEDVEKQLKGEEAPKEQEPPKEMGFISVSIGDGINEIFQGLGVDYIIEGGQTMNPSTEDMLNAIEKVNAKNIFILPNNKNIILAANQAASLVEDKKIIVIPTKTIPQGITALINYIPDSTPEENAERMSEELGTVKTGQVTYAVRDTVIDDKEIKQDDFMGIGDQGILAVGKELEATVLDMIEQLIDEDSAIVSIYYGEDAREDAANAIGEKITEAHPDVEVEVHYGGQPIYYYVISVEMNGHMETQLGKVTIDPEVIATYAGSVAVECFGIVGMAAVNMKDGLVKLLKKDYLTHGINVVIDEENKITIDFHVIVSYGVSIITVSDNLIETVKYKVEAFTGMEIKKMNIYVEGVRVIDMAKCAVCGKGAHFGNNVSHSHRRSNRMWKSNIKRVSCKVNGTPKKLYVCASCLKSGKVERAMAKRFFDVFPSLQVEGDMKNLLTETEVTKVGMNHERDHLRVYLSSTRLIHKKDIRQLESAIAQQIFKGRMMQVKVIEKYHLSEQYTPEKLLDLYRDSILEELKDYSLMEYNLLRTAKMEFTSESHMLLTLENTIIAQTRSHEIVEFLEKVICERCGLDLAVELAYEEPKESKYKKNSDLQIQFEIKNIMKKVHIRNDDGESVPAVVEGGAEAVSDGTTTSGGTGGNATTNTVSSAKNAAKPAEHAGKTAGNGEKGKKEFKRRFEGGGFKKSDNPDVIYGRDFEDEPIAIEKIVGEMGEVTIRCQVMTLETREIRNEKTIVIMSVTDFTDSIVLKIFTRNDQLQELLDGGLAKGAFLKIKGVTTIDKFDSELTIGSVVGIKKIADFTSTRADTSPEKRVELHCHTKMSDMDGVSDVKDIVKRAMKWGHKAIAITDHGDVQAFPDANHAVPPDSDFKIIYGVEAYLVDDLKDIIVDSKGQSLNDSYVVFDLETTGLSPDKNKIIEIGAVKVVDGAITERFSTFVNPEVPIPYNIEQLTSIKDDMVLDAPRIEEILPEFMKFCEGTVMVAHNAEFDTGFIRKNCERMGLPFDFTIADTVALARILLPQLNRFKLDTVAKAVGVSLDHHHRAVDDAACTAEIFVKFIEMLHERGMETLDDVNQMGATSPELVKKLKSHHAIILATNDIGRINLYRLVSMSHLTYFHKTPRVPKSEFVKYREGLLLGSACEAGELYRAILDGRPEEEIIRLVKFYDYLEIQPIGNNSFMLRDEKSAINSVEELQDINRRIVKLGETFNKLVVATCDVHFLDPEDEVYRRIIMAGKGFKDADDQAPLFLRTTEEMLKEFEYLGSTKAEEVVITNPGKIADMCEKIAPVRPDKCPPVIENSDQMLRDICYTKAHSMYGEELPSIVKERLDRELNSIISNGYAVMYIIAQKLVWKSNEDGYLVGSRGSVGSSFAATMSGITEVNPLQAHYRCAYCKYSDFDSPEVKAFSGRSGCDMPDKICPVCGKKLVKDGFDIPFETFLGFKGNKEPDIDLNFSGEYQSKAHAYCEVIFGYGQTFRAGTIGTLADKTAFGYIKNYYEERGVHKRNCEIDRIVQGCVGVRRTTGQHPGGIVVLPVGEEINTFTPVQHPANDMTTATVTTHFDYHSIDHNLLKLDILGHDDPTMIRMLQDLTGIDPTTIPLDDESVMSLFKNTSALGVTPDDIHGIPLGCLGIPEFGTDFAMQMVIDAKPQEFSDLIRISGLSHGTDVWLGNAQTLIEQGLATISTAICTRDDIMIYLIQKGLDSEQSFTIMESVRKGKGLKEEWKTEMRAHDVPEWYIDSCLKIKYMFPKAHAAAYVMMAWRIAYCKVYYPLAYYAAYFSIRATGFNYEIMCQGKERLEYFYKDYTRRKDSLSKKEQDTYRDMKIVQEMYARGFDFTPIDVYRAKPDRFQVIDGKLMPALNTIDGMGDNAAIAVAEAAKDGKFLSKDDFRQRTKATKTVIDLMADLGLLGELPESNQLSLFDFAMTKVVKIGDRVIGGGNPILIQSMTNTKTEDVAATVAQIQALTAAGCDIIRCAVPTMEAAEALTEIKKQVSIPVVADIHFDYRLALAAIEHGADKIRINPGNIGSTERVRAVVDAAKERGIPIRVGVNSGSLEKDLVEKYHGVTAEGIVESALDKVHLIEDMGYDNLVISIKSSDVMMCVKAHELIATQTDHPLHVGITESGTIISGNIKSSIGLGLILHQGIGDTIRVSLTGDPLEEIKSAKLILRTLGLRKGGVEVVSCPTCGRTRIDLIGLANQVENMVADIPLDIKVAVMGCVVNGPGEAKEADIGIAGGIGEGLLIKNGEVYKKVPEGELLEALRYELLHWNEQQKMKIIIAILIFSLIIIFHELGHFLLAKANGIRVNEFCLGLGPKVFGITKGETTYSLHLFPIGGACMMEGEDTESEDGRAFGKKSVWARISVVIAGPVFNFLMAFVFAFILLCNIGYDLPVLAGVTEGYPAEEAGMQAGDTILKIDHTRIHFFRDISAYTQFHSGDAVTVTYERDGERYQTVLTPKYNEEYGYYMYGFQGSAQKTKGSVLSNLKYSVYEVEYWIRVTIDSLKSLVGGKVSVNDMSGPVGIVNMIGDSYEQSVTYGYYMVFLQMLYIAIFLSANLGVMNLLPLPALDGGRLLFLIVEVIRGKRVDPDKEGMVHFIGMMLLFALMFFTFFNDIRKLFGMMKIAILGSTGSIGTQTLDIVREQGDIQVTAIAAGSNIKKLEEQMREFHPLLVCVFQEDAAKELRDRTKDLNVRVVSGMDGLLEVAVQPESEILVTAIVGMLGIRPTIAAIEAGKKIALANKETLVTAGHIIMPLAKKCGVPILPVDSEHSAIFQSLQGENGNRIAKILLTASGGPFRGKKPEDLAHIQVEDALRHPNWTMGRKITIDSSTLVNKGLEVMEAKWLFDVELEQIEVVVHPQSVIHSAVQYEDGAVIAQLGTPDMRLPIQYALYYPKRRPLSGDRLDLFALGQLTFERPDTETFRGLALAYQAMRRGGNIPTAFNAANEKAVALFLDRNIAYQQIPEMIESCMEAADFIANPTVDEILETEAAAYEHIAGKWGKVFAMFKTRLLSGIVLVIAALVLIITGGDVLLVSTLLISWIGMFELYRIFHIEKSAPGIVGYATAAVYYANLRFGFLPDLMMLVLGLLIVLMFVYVFTYPKYQTEQLLAAFFGVFYVAVMLSYVYQTRMLSAGTYIVWLIFLCSWGCDTCAYCVGMLIGKHKMTPKLSPKKSVEGAVGGVIGAALLTVIYGMVFRGAMGSEMSHVWIMAAISAAGALVSMVGDLTASAIKRNYGIKDYGKLIPGHGGILDRFDSVIFTAPLIYFLAANLIVLMETGRKIPQHIAIILDGNGRWAKAKGMPRNYGHTAGARNVETVCQAAHDLGVKYVTMYAFSTENWNRPEGEVEALMKLLESYLKNCIKTADKNNMRVRVIGDTTRLSERFQERIRELEAASAKNDGLNLQIAINYGSRDEMTRAMRRMSEDVAAGKRKPEEITESVFEEYLDTAGIPDPDLLIRTSGELRLSNFLLWQLAYSEFYFTDVPWPDFHKEELERAIEAYNKRDRRFGGLTDNKMDQRLAVFDEKMGKTMNNLAEEFGGIRAGRANPHVLDKLRVDYYGTPTAIQQVANVSVPEPRMIQIQPWEASMVKEIEKAILTSDLGINPTNDGKTVRLLFPELTEERRKELAKDVKKKGENAKVAIRNIRRDANDSFKKLAKEDVSEDEIKQLEDQAQKMTDKYIADVDRAVEAKTKEILTVMKRVLLKLSGEALAGDKHTGFDEPTVTEVAKQVKQIVGGGTEVGIVIGGGNFWRGRTSETIDRTKADQIGMLATIMNCIYVSEIFRSVGMQTQILTPFECGSMTKLFSKDRANKYFAKGMVVFFAGGTGHPYFSTDTGIVLRAIEMEADGIYLAKAIDGVYDSDPKLNPNAVKYDEVSIQEVIDKKLAVVDLTASIMCMENRMPMYVFGLNEENSIVKAMTGEFSGTKVTVSMGFFKDFKDDFSQAVNELMPGEDNLESTDKDDDMVVNTLEDEVDVASELSKLDGLLEQVTKQEPALERTQAATVEPQKTREEYTQHAMAAAQEEKKMADNTVTPVQVAQTGAQTAASQTTPQEKPIVSDEVSVITEGTIINGDVISNGSLDIRGQVDGNVSCNGKLTVTGVVNGNSNTSEFFADSAQVEGEVVSSGTVKIGLGSVIIGNVTSNSAVIAGAIKGDIDVQGPVVVDTSAVVMGNIKSRSVQINNGAVIEGFCSQCYADVDVQSLFNAKKGNMQDKDSEALRNQRRRRKRIARMKHTIIAIIAGWIILSMILIIFLLVRTRSMERKLDELWQMQRVMNQQVPDTEALPQEETSGMDTETVAVTAPASGIDETDNLAQDGDVHKVYLTFDDGPSENTDAILDVLSEYDVKATFFVVGKEDEASAAIYQRIVDEGHTLGMHSYSNKYSLIYQSEDAFEADFHQLQDYLYEVTGEKSRYYRFPGGSSNQISNVPMSSLIRFLNSEDVVYYDWNVSAGDAANAAYTPEELVENVVSDVSKYKTSVVLLHDSEDRSTTVEAVGPLIEALQDMDAEILPIDEDTQVIQYVKADSARMEFIKNVIRGITIGIANVVPGVSGGTIMVSLGIYDELLQAVTGFFRHKKESILKLFPYLFGMGIGIICLSFMIGYLFENFPFQTAMLFIGLIFGGVPLIWRKVSRGYPKVPELALFLGFFCLMIGMQFLGKGSEQVLAAGPGTAVKLFAVGLAAAATMVIPGVSGSMLLMALGYYTPVIDHINAFVVAVVMLDAGTAWYCLVLLVPFGCGVLGGIFLVAKLMEYLLCRFERLSYWAIFGLLAASPVAILGKIPLRGTSPAVIAWGVMLFSVGAVVTGLLAGETMEYKNFFALLGGLALFLYGMHQMSEGLNAAAGEKMKQILERLTKNRFLGVGIGAAVTAVIQSSSATTVMVVGFVNSGMMTLRQAVWIIMGANIGTTITGQLIALDAGAVAPLLAFFGVVLILFAGKDRIRYTGEIVAGLGILFIGMDMMGEAMQPLCDSQVFLQAMTKFEHPLLGILAGAAFTAAIQSSSASVGILQTLAQGGAVSFAGAVYVLFGQNIGTCITAVLAAIGTGRNAKRTTIIHLSFNLIGTVVFTVLCMTTPLVSLVAQLTPGRPAAQIANMHTIFNIGTTLLLLPAGNLLAGMAEHLLPDKKSESLAAEQRKAACKKVEDVWNSMRSADRRKAFFAVCMMAVLLFSHLGVCLWQTQIAQVQNLTAEAGGEAQGILRTTDSDYVSNALSAEPEAGLSQSMIVVTRKMTGAAEQRLFFHLFTAVLFKIAEIPYAEAVVLTVTAACICLAGYRMVRFVHNSDGKKDLPFWLSQVSEASMLEDFFENYFKIEKAYRKYFQDEMEKYHLTPNELLVLLFLARDNGGCNTARDIAQYEGVSKGLVARSVESLVEKQFLVVERDAADKRICHLYLTQQCSALTEQMTEKKAAFFRRLAEGIPEEAIATTEQTLRRFMENISASIDKSMCDAILNKKLKEKFDESVSAVLPITVIVLLLSIFVVPMETGTIALFLVGAFMLIIGMAFFQLGAEMAMTPLGEGVGSHIMKTKRLSILIIVCFVMGVIITIAEPDLQVLANQVPSIPNETLIWTVALGVGVFLVIAVLRIIFKLSLPLLLCILYAALFLLSFAAPADFIAVAFDSGGVTTGPMTVPFIMAIGVGLSSTRSDKDGSSDSFGLISFCSIGPIAMVLLLGIFYHPAGASYNATEIPDVVTMQDVMRQFVHMLPDYGREVISSILPVLIVFLLFQLISRRYHKNQMIKMLMGFLYTIIGLILFLTGVNVGFAPVGSLLGSNLAAQTWRFVLIPIGALIGYYIVKAEPAVQVLNKQVEDVTNGSISRSAMNLCLSIGVSASVALALLRVLTGLNIYWLLIPGYIIALVLTRFVPKVFVGIAFDSGGVASGPMTSTFLLPLAMGACTAVGGNVVTDAFGVVAMVAMAPLIAIQIMGVLYQLKLKRATSDALIMVDVDDNAIMDIEEEMQDHTMQHKKKMPAFRCLVIIIDSNIRDKLTEFLTDASIPIYYQMHGVGTVSSDFLNLCGLGDTHKTIMLCIVPKERTRMLLAEMNQALQLHKRGTGIAVSIPLSGIQGWLYKVLGSGSLDSSEPEIEKEVKKMSETITHAMILVTINQGYSDDVMYTARAAGATGGTILKGLRCSPEEVAKHFGMALQEEQEVLAIVVPKDKKTEIMTAISKQHGIDTPAHGVSFALPVDAIMGLMAITAAMVKELREMTGAGMMDCKKALNETNGNMDEAVEFLRKNGQAKAEKKASRIAAEGLCMVVTKDDQTAAVVEVNSETDFVAKNATFQEFVKAVATQAVNSDAADMDAFMAEKWNEDASKTVSEALVEKVAVIGENLKIRRFEKVVAEHGCVVPYVHGGGRIGVIVDADTDVVNDTVKEAMHNIAMQIAALNPKYVSRDEVSADYIAHEKEILLAQIMNDPKESQKPEKVINGMIEGRISKELKEVCLVDQVYVKAEDGKQTVAKYLEEVSKAVGGTVKVKRFVRFETGEGLEKKQEDFAAEVAAQMNAMSVISMKQLLEAGVHFGHQTRRWNPKMAPYIYTERNGIYIIDLQKSVGKVDEAYKAVSDIAAEGGTILFVGTKKQAQDAIKTEAERCGMFYVNERWLGGMLTNFKTIQSRIARLKEIETMATDGTFEVLPKKEVIALKKEWEKLEKNLGGIKEMKKLPDAIFVVDPKKERICIQEAHTLGITLIGIADTNCDPEELDYVIPGNDDAIRAVKLIVSKMADAVIEANQGAEMTAEEAESAEADAAEEAMKLKYYLRGLGIGIIVTTVILAVSFSKKEIKMSDEEIMARAAQLGMVMQETETTEQGDTEQDPDGTDTGAKTEVVTEQTASELLEERTAAEETAQNTEAAAEDVAAEAQENSANTDEETQAQQEAADAENPSGVYRLVIQKGDVCRIVCEKLAENGVISDAETFRQYLSQIGYASNMRVGNYDIPYGLSNEEIAKILQAGPLEEMTGVAWILLLIGVVFMIGSFFVTEKLSPSELNQIAELSEEELKRIIDRGLKNAETRIEDAIDEQVDQSSEKVDRSLEKVTNDKIMAISEYSDTVIESMNKTHNEIMFLYSMLNDKHTELTGMAADLQRLAADVRSLEEKAPLTAPQAASERAAAVSAASAVTPVSVETADTTERETAAAPAEQKEEMPETEETKQEGLHAEILKLKKLGMTEVQIAKKLGIGIGEVRLVNGLYRGESDSMSIRPVVLNGMIQRTQDVGNLKQQEDNRPIVEQQNIQIEQQKHEDQLTHRVQDPEEKENDGYRYDAKEKGNNEYEGESGRHKKRREEEPENEGKVILKGQGSHFDIKIMKTVDREKLWGEYQKNPSSALREKLITEYAPLVKVVAGRLSMYLGYNVEYEDLVSYGIFGLIDAIDKFDPGKDVKFETYASLRIRGSILDQIRKMDWIPRTVRQKQKRIEEAIKNIEARTGRAAADEEIAGEIGIAAAELNEWQSQLKVTNVVSLNEFVEQGGEPVMDARGNSHFAQPEDNIEEEELKKVLSETMDLLTEKERKVILLYYYEELTLKEISNILEVSESRVSQLHTKALLKMRKKMGSYMGILTEMKTKSVPAIVMLSAGFVACVAGICAHMEVADFMKMLLIVLIVFYLLGGVVKIVLDRNFAGMNDEETTDGTLPQEEEDPEAEENETASEETENADAKEQMSEVIKVGMADLNVCKAPDVITTLGLGSCIGLVLYDPVTKVGGMVHYMLPDSTKVRNNSNIAKFGDTGIRELLKRVVAAGASKPRLIAKIAGGARMFEVSGLSDVGNIGARNAEAAKAILKELGIRLVAEDTGLNYGRTVELHCDTGEFYIKSVGKPLKIIMGNMTLEQVNDMYLDVLREIGNIGAGNATSAIANMLGMKIDMNVPSIRLMEVSQLGMAVGAEDETIVGIFLEVETDIEGSMMFLLDIPSARYLVNKLMMTNEPDDQPFGEMELSALKEIGNIIAGSYLSALSSLTNLVITPSVPYIAVDMAASILSVPAIEFGQYGDNALLIQTEICADVAINGYFILMPEQDSYEKILTSLGISIMAEKNVEVIDKESKQYIVVMVGSEQYGIDISYIDNIVRMQKITRVPKIQSYFKGVINLRGEIVSVMSIRNKMGLEDDVFTNASRIIILKLEEKGAIGVIVDEVKEVVNLSEDEIEKSTNKGKFINGIGKHGDDLISLLEINSVVDDNAMDVSQYLEIFIDETSEHLQNLSDCIMELEKDPENMDTINEIFRAAHSLKGMAGTMGFKRMQRLTHDMENVFQEVRSEKVKVTSSMIDLLFKCLDAIEGYLDNVKASSDEGTEDNELIIKELNDFIAAEDGAAAAPAQAEPKKEEAPAQTAGGDDKKYFEFGLSESEKDKIKQAEEGGAHIYGMTIYIQKECLLKAARAFLVFKAVEEFGEILVYNPSSQDIEDEKFDCDFSIFIASDEPYEKIAEAAKSVSEIDKVVGEEVKYETLAAKQEKAEADAAAAEKSQDAPAEAAPAQEQPQAQAAKPAAKTQSSGNKKQTVAKPVTNRTVRVDIEKLDALMNQVSELIIAKNSLVSISSTDSGDFQNQSFHEQIEYLERITTNLHESVMKVRMVPIESVVAKFPRMIRDLSRKLDKKMELYMTGEDTELDRTVVDQIGDPLQHLLRNSADHGLEDNATRIAKGKPEVGSIFLNAFQEGNNVIIQVGDDGNGIDVEAVRNKAIERGVITEEQAETMSQKEIINLLFLPSFSMAKKITDISGRGVGLDVVKSNIEALGGDVEVKTELGVGTTFTVRLPLTLAIIQALMVEIRDEKYAIALGSISNIEDIPVKDIKYVEAQEVIHLRGKVIPLIRMDQVLDIEPKEEEPESLTVVIVQKGENLAGLVVDNLIGQQEIVIKSLGKYINNNKIISGATILGDGEVALILDVNVLMMSKKILIVDDSALMRRVMCDIINSDGTFQVTDTCRDGLEAYEKLKTTRYDGVVLDVNMPRMDGLQLLEQLQKDRIRATVIMVSTTTTKDADVTIRAMERGAVDFVTKPTNVIEAKGEEFKKQLLDVLSAVCATQSYNRERRIAPQTKAVSAPAGTAKPVATAGHAIKSGSKIVALACSTGGPKALQSVIPYLPKNLDAPMVLVQHMPAGFTKSMADRLDEVSPIHVKEAEDGDVLMKGTVYIAPGGKHMEVKRQPDGSHRIRLNDMPAIGGLKPCANITYDSLRDCGYDQVVCVVLTGMGADGTKGIVSLAGKKPVYVIAQDAASCVVYGMPKAVAEAGVVDEVVPLNDVAKSIIKNVGVKMTIAEIIQPGDKVDISFVQNVERAKKDQSMPKIYKSQVLDLKENGNLEISMPVERGKLVLLPLGIRMEFIFFSKGTLYRAVGQVRERYKRENVYMLEIELKSQISKYQRREFFRFPCIMDMNYYTIEEQEAALKTGEALFIELQEAEGKSRDREYAGRIVDLSGGGIRFRTDQKLRENQYVLFEIHLQNENLDKQYYIIGTIISCIKTEKTPETPYEARAKFLITDSSVREEIIRFIFEEERKARQRGRAMDQAEKLRSVVKLKKQNYKPDARVITVTSGKGGVGKSNVAVNLAVQMQKMGKRVLVFDADFGLANVEVMFGAIPKYNLADVIYHGKQITEIISEGPMGIGFVSGGTGVTGLGNLTDEQISYLLHCFGELDQMADVILVDTGAGIANHVLEFVLASPEVLVVTTPEPTSLTDSYSLLKSLYRNPKFNREYTKISVLSNRVTSAAEGRGVYDKLNTVVGQFLEGEITYAGMIPQDSALEKAIRMQKPVSLQAPLSKSARAFEVVAAELLQGESSDAYRSFGLSRLFSGFWKQKNEGVEMTINKYQGKTKEEAVEKAKQELGAGAVVLNVKEIKPKGMFKMFKNTLYEVTAAVEEKEAFPAQTLRSETKPVHDTISLAADEKITIPGVARENTRPAVAPAPAEQEVVPMKEAKRESTNEGLEKRLENLSNILEKQFSVEEMRKSHPVEPQEKENRTEGFQFIKMLYRTLLENDVNEKYVNQIMDEAEKVLHNGSSVDSILSNVYQKLILKFDQPQTIELTGKKPKVIFFIGPTGVGKTTTLAKIASRYKVDKEKKVAFLTADTYRIAATEQLRIYANILDAPMSIIYTPEEMNDAIARVSEYDLVFVDTAGFSHRNEAQCQDMKKLIDGLDEAYEKEVYLVLSATTKYKDLLEIADTYREIANYKLIFTKLDETITYGNILNIKLYSGAKLSYMTSGQNVPDDIEVFDTQKIVKQLLGGRMKKADIGVALYLLAAVIFLIVPINSTLLDVMLALNISIALIVLFNTLFVKEVLDMSFFPTLLLFTTIFRISLNVSSTRLILTTGAPGNVVETFGSFVGGGDMIVGAVVFIILIIIQFVVINKGSERVAEVSARFTLDAMPGKQMAIDADLNTGAITETQARERRNKIQEEASFFGSMDGATKYVKGDATAGLIITFVNLIGGTAMGMMRGGLDFSEAIQRYGLLTMGDGLCSQIPSLLISLSTGILVTKASKNADFSNILVKQLFGIPKALYLVGGSLIFLGAVTPLNVVLFAALGAAFIVAGRMVDKNIGIENIEEEVSQAETEAEEIRKPENVVSLLQVDPIELEFGYGIIPLADVNQGGDLLDRVVMIRRQIALELGTVVPIIRLRDNIQLNPNQYIIKIKGIQVTEGEILFDHYMAMNPGYVEEEITGIPTFEPSFHLPAIWITESQRERAESLGYTVVDPPSIIATHLTEVIRSHIAELLTRQDVQNLVNNLKESNPVLVDELVPKLLGLGEIQKVLQNLLSEGISIRDLLTIFETLADHAPATRDTDVLTEYARQSLKRAISSKYFPANETTSVITVDPKIEQEIMGSVKQTEQGAYLTLDPERTKAIMASVEEEVAKLENMGKPAIIMTSPIVRMYFKKLTEDYFKDLTVLSYNEVESNVELQSVGMVTIMEQDRRQILPYHLQWFAKDGPGGEKTEPATAKKLREAREDGKVAKSKELTAAFDLIVMFLMLKIFVSTIGDGFLQIFYYVYNLIPDFIGINAMDVSTYAVMSFFSPVNIQMLKIVAPFFIFGFAVTLLVNILQVGWKVSTKPMQPKLDRFNPVNGMKRIISKDSVFELFKSLIKIALILYIAYTAIKDHENDLFILYDIPLNQAIALCGDVIIGAGLKISLVYLVVGIADFIYQKYRFNEEMKMTKQEVKDEYKNTEGNPEVKGRQRQRMREASRRRMMQDVPKADVVITNPTHLAVAIKYEPEVHKAPVVLAKGEDYLAQKIREAARENHIEIVENKPLARMLYANVEIGNEIPPELYQAVAEILAMVYNMRQMLNYTFSLVDFEILILILVRISCFVYAAPFFGMKNVPSRVKIGLSFLLSILIFPSVDQSAVTYTGMFGYAVIVLREGITGLLMGFAANICNSIILFAGNIIDMDIGLSMAQEFDPMTNSQVTITGNLYQYLLLLMMVVTNMHHYVLRALIDSYQVIPVNGQVFQWDSLAESMTTYMADSFVIAFRIVLPVFACMMILNCILGIMAKVAPQMNMFAVGMQMKVLLGLTVLFLTVMLLPGISDFVFKEMKRMIVSMIEGMYMTEGQVLDIARQALYTIILCSAPLLIISLVVGLVVSIFQTVTSIQEQTLTFVPKIICVFLGMMIFGSWILTNLTEFINTLWSDFSIYLGMTKSKLKKSYCIMSFVFAVAVLIIALTLSMGQTRVYAADTSSDMITGLSNTDSSDGLTDATSDINNGLSITYNNDTGAVSTPIKALLVLTIISLAPSILIMMTSYTRIIIVLHFLRTAIGTQTAPPNQILVGLALFLTFFIMWPTFQQINEDAIQPLDNGDITIEEAYKAAETPIRDFMYGQTQEKDLHLFMDIDGEDYPDQMTLELYYDVPMTTVIPAFIISELRYAFIMGFLIYIPFIVIDMVVASVLMSMGMMMLPPTTISLPFKILLFILADGWNLVIGSVVKTFYMILLSSSLNSFIQLLGVLLIFLFVLVITYFTTKWIGGYQKVQMSGRSFQVVDTIRIANNKLVQVIKMGDVYLVIAVAKDNVTMLAKLTEEEMGLTEAEICNGKTPGQNGEKGQMTFQETLEKLKEHFPKKQDMAKIMICDDAAFMRMMIKDILTKNGYEIAAEAENGAVAVEKYPDAKPDLVLMDITMPDMDGIQALKKIKEIDPNANIIMCSAMGQQAMVIEAIQSGAKDFIVKPFQAERVLEAVKKVVGMDGVMSQEEINALLNGSEDSSEQPKEEVLTEKEKDTIGEIANISMGTAATTLFSLVNRKVEISTPVVSFANWSDICEAYEKPCVFIRIGYTVGLDGSNILVLKEHDVKVITDLMMGGDGTNTDGELGELHLSAISEAMNQMMGSAATSMSSMLNKVIDISPPQADLIDLQETIDESVIDEFLAGEFVKIRFRLEIGDLVDSDIMQLYPIPFAKEMCESVTQNMEEDTNSTAGSKGSAPEAQAAPQPQAAPQPQAAPQMGQPAMGAPMMGGQMMGQPMMAQQMPQMYGQQPVNVQPAQFQAFTGSVPVGYGPENIDLIKDVPLEVTVELGRTSKSIKEILDFAPGTIIELNRIAGEPIDVLVNGKYVAKGEVVIIEESYGIRITEIVKMGEVLSQNEIDSLLKALSSGELDVDEIKDDNEKQVKNYDFARPAKFSKEHLRTLEIIFEHYGRLLSTNLPVYLRKNVQVEVMSSEAVTYSEFANALSNPVLLGIVNFAPLNNNIIIEIAENVGFTIVDRMLGGQGAPLDKTREFSEIELLLIERIYNVCVNLLVEPWASVCELTPRLERIETNSQYAQIISPTEMIALITLNIKIGDVEGLINICLPYITLESVMDKLNTKYWYSSLQEKDEQQYTETIEALIARAPMPIKAVLGNSSISVNDFLGLQVGDIIRLDTKVDEDLSVYVGNIKKFTALPGASGDNYAVRVTSVIREEQMKKNLLAVIILALVLVNLILTAVLVFSIIPQTKKSNELIDQVCAAINIELEGGQNKDSSAVPIEEIAVYNITDNFTVNLADNGDGKKHYAVFSVGLSVNKTSESYATYGGDEMTELTDKETIIRSDINTVVAKYTEEEFNADGQKAVKEEILSKMQDLFGSDYIVGVNFSSVATEAHMARRKEDPPKGSPAWMNTFADLMNLLLCFFVMLFSMSSVNEEKFEKVIASFQSTFSILPGGGASIGEGELISSGISQLENFDSYYNQQLSSQSDGQTEEEKDITEAYEQQELEESEDMAQQLENALSQYGIQDDVEVDFNAEYVTLNMNGALLFDSASAELRDEAYPLVNKLGKILVTYDNNIIEVEGHTDNVPIHSSKYEDNNVLSMYRALAVANYLRDTTTLDPAYIKSSGRGEYVPIADNATPEGRARNRRVEIKIYNSYNSNVSGTSTDDTGTETPADAALSTETVTDTPEAATTGATVEPTEVVNEMDIASLAGMLLGVVMFLFGVFSSGGASGLFNMFDFPSIIITLGGSISGTLASNKLQDFIAGLKSITLTFKEVPQDPAAVIRNIIDLSNTARKEGLLALEEAANGIEDEFLKKGIMLVVDGTDPELVRGIMETDLGCIEQRHKKSIAVWEKWGELGPAWGMIGTLIGLILMLKDMNDASTIGPKMAVALVTTLYGSLIANWLCNPTASKLSVNNNNEMMMKEITVEGILSIQAGENPRVIEEKLKSFLSPSAREETAEGSVGGEEMMRSMYSAVSGLKTHQTKMDVIGNNIANVNTVAFKSSSVTFQDMLYQNTSGASGANAATGVGGVNAKQIGLGVTTGAVNISITSAGAAETTGRAFDLRMTDQSTTNFFIVNNGSSNLFTRSGSFYVDGAGNLCMTSTGYTVMGWQVDKTTGNIRKDTVSALRVMSTENLTSAPEATSEATCGGIIDKNDTDVLSDDGLIKNLKFYDNLGYEYTARFSIKSTGTDGEFTVELLNVLDGDGNTYYDPENIQAGQPALNALFGNTEDATKSYTLGKDYTYVSANVIVDKSGNYYQYNAATHSYDQVKSATDMTVVTAGALSLTQVYGAGADILAKADAYTGNGTGYAVDGTTGALTLTYNSVYHRLSFNTDDGTFSKVGNVADAKSVGLNMSLFGGQFANINVDFSTCQNTNNGGKSTVTMSKGATDGTTGAGKKLGNLIGLSVSNNGEIYGIYDNGNRNLLGQIAVAQFANAAGLEKVGENCYSTTLNSGEFDGIGEDITADGSKMTSGELEMSNVDLSTEFTQMITTQRGFQANSRVITTSDTLLEELVNLKRMNKITNQFASIEQVTDRYLNRKSTETAAQENSVSFEDILRQKQTTAESQELRFSKHAQGRLNDRHINLSDEQNERLESGVLKASEKGIRESLVILDSLAFIVNVPSKTVVTAMDQSESESNIFTNIDGAVIVMALVQAVENGKITESTTETTTSAGNDLGYDEFLQLLCAEMQYQDPLEPTSNTEYVAQLATFSQMESMLNMQNSIESTKANDLVGKYVIVKTTSETTGETTAVAGFVDYVQYENNQKYIYVNGNRYSLDDVYQVADTEYMEAVSLAEAFKASVAKLPDADKLTLAYQTDVENLATVYNGLTSYQQSYIDSDTLATFVKLDGTMKSLVFDNALSQIPSADELTLENKEAVEALRKNYDSLTTTEKTYISKDSYDQLTALEAKIAELEKKAEMGDNNVASIGKMLMQTQSGQSVTGVDGADIGTTFRKMVDQMTQIPGSSVSTGSQTAQNMQQLTPHSPEQNYDRYQYQKNKIPEQSTKDWTAGSQVSEKLESFEESVRDVIKDELQVTDEQITEAMETLGLTVADLMNPQQLAALAAELTGTEDMSALLCNEAFMNVMQSVGTLTEDLLQELGVTAEELTQLLEDAGQADMNADLMQTVQTADAADARRVYADTADGIRDTAEQPQTAAVAETEPRAVRSKDITPEETDAQAKMADAGTEEETVADVAAGTGKEQAQTGSNSNSGQQDFASQAHAGVDVHTGPTLTETVAMQGANSAGEYAAQVDIADVVRQIVTYTRVNYTANQETTMEMQLNPEHLGKIYLEITSKDGTVSAHLTAQNEVVKEALESQIADLKQNMNQAGVKVDAVEVTVGGHEFEKNLEQNAKQEEQQAEEREKAANATRHINLNELDGLSGLMTEEETLVAKMMAEQGNSVDFTAMAEEEKDEVLDKKAAKAQEKAARAEAKAQKKADRKKAKELNDDLDMDDETSTGGKIAVFFVTLIIILIWLAIIVLLIKCDVGGFGSSVLAPVLKDVPYVNKILPDSATEEVSTEDDAYGYTSIDDAVARIKELEKELADAQNTSSANAEYIAQLESQSAELAQYKQNEADFEAEKQKFYQEVVFSDSAPDIEEYKQYYESIDPADAEIIYRQVVEQTAANDEMDDYVKAYSSMKPKEAAAIFDTMTDNLQLVADILDSMDAQSRANILGKMDAATAAKVTAIMEPVEMAKFTYRMQNILDIKIKLENQAKIAYATASRQLAEEQEKLREILMRRAGYERKSKELVNGTLDIQEIRECKRAIDVMKSLQRAQMMKVHAAEKTLEMARIELNRVMVERKTHEKLRERAFEEFKQEIAQAESKEIDELVSYNYHEGMMTHQFEKYLQLGEKTYFNRLGKVVKIVGLTIESVGPDAKLNDLCRIVIDREKDHAVMAEVVGFRDKRLLLMPFENVEGIGVGCIVENTGHPLGVLVGDGVLGHTLDGIGRPTDGGVIEGGCEYPVEADPPDPMSRKIISEVLPLGVKAVDGLITVGKGQRIGIFAGSGVGKSTLLGMFARNTKADINVIALIGERGREVREFIERDLGEEGMKRSVVVVATSDKPALIRNKAAKTATAIAEYFRDQGKDVLLMMDSLTRFSMAQREIGLASGEPPVTRGYPPSVYSEMPKLLERAGTSDKGSITGLYTVLVDGDDFNEPITDTARSILDGHIVLSRKLGHKNHYPAIDILQSISRVMSAIATSEHKELAGRLKNVLATYNEAEDLINIGAYKSGSNREIDYAVQKINAVNQFLCQRTDEKFLFDEEIDLLKKLFEDMSNLYKQWFVQTDSTNTRIIDSNVILQQHLKQDLPQTQTPAQNVQEEEGGFSAGLVTGDPGQVIKAEPQIDYEAKAKAKAEEILAAAQQNADAILAQANEDAEEIRTSAKTQGYEEGRASAEQENEQLRVQLEESYRKKQGDLDSDYRDKREHMEQDLVDVIVTVFEKVFHIQFDDKKEILMHLIEDAILNIEDDKRFRVKVAEDNALFLENHKTEILDRVGHDIELEIVSDATVEGNDCTIETDSGVFNCSLGTQLENLIKDIRSLCSMAKNEEFTGLQKAAILLITLGPERSADIFKHLKEDEIEELTLEIANTRSISPQVKEDVLNEFYQICLAQQYIAEGGIGYAKELLDKALGADKAQEVISKLTASLQVRPFEFVRKTDPSQLLNFIQDEHPQTIAMILSYLTAPQASMVLGALPPEKQADVAKRIAMMDRTSPDVIKEVERVLERKLSSLVNQDYTIVGGVDAIVSILNAVDRSTEKHIMESLEIEEPELADEIRKKMFVFEDILLLDDRAIQRVLRDVDNADLGVALKAANEEVQNVIFKNLSKRLAAMIKEDMEFMGPVRMKDVEEAQQKIVSVIRKLEDAGEIVISRGGGDEIVVMPEQVQKILTKITDWWKKFTTKQRILLGSIVAVIILALVILAVVVGKPNMVTLIECSSTAQAGEVKDLLDNDGSISYQMSDDGLTFYVDEKDNAAASILLGQNGVPTEGFSIDNVFDGGFSSTEADKTKKYKLYLENYFADQLETLSNVESASVTLDIPNDDGTILAREQDSYAAVILTLNSDMSDEQAQGLAQYIATQLGNDTTDNVLILDSNSNVLFSGGDSDSSVGTASSQLSLRTKTENLLKSEVKDVLVGSGLYDHAEVAAKLDMNFDAYRETERQYSAPDGQTNGMIDEQSNYESNSVGGAAATPGTDSNDDTSYVIEDNNYTESTITDTTTKYQNNEKVTDRTAATGTINYDTSSIAIVVKNYVIYDEDTLRTSGALDNMTFDEYIAANSDPVKTTVDQDNYTMIANATGFPEANISIIAYDEPIFQYSSGGRTLSDYLQIILAVLILLLLGYVVFRSTRKEKQAEMEEELSVESLLESTKENQEPLEDIGYNEKSETRLLIEKFVEEKPEAAASLLRNWLNEEWEMDISLLTNATSPDYMSAVTQKTLLSVDTDESFDSVLSSAINMLNETNDLQNDSQSAKIQFALGEADNPHDMQIAAAKAYEALQYTVAVRDKMLDAYKEIMNMQIMGLFQSFDISASGMTAERFRIDTIAENIANVNTTRTEDGEPYRRKIVTFAEKDLTPFSKYYQSSRARAVGNGVKVTSVKEDTETDFTMEYDPSHPDADENGYVRYPNVNTVTEMTNLIDASRAYEANTTAFNASKSMIQAALKIGQMITTNAFDYINIMDKAADASWKRESAISNNIANTDTPGYKRQDVDFESALKRELGSSKYIPLDKKVRGLNSDLSGLDVSTYTDSSNYSYRLDRNNVDVDTEQVELASEQLRYEMLTTSINEEFNRMKLVLKMSVQLLDKTRKINKLLHNNSSSKVVFNDICDVLKDILASNILVISKKGKVLGTGVCPGVDEIQELIVDEVGGFIDPLLNERLLGILSTKENVNLETLGFVDHVKEYTAIITPIDIAGERLGTLFVYREDRQYDIDDIILSEYGTTVVGLEMMRSVNEENAEETRKVQIVKSAISTLSFSELEAIIHIFDEMDGKEGILVASKIADRVGITRSVIVNALRKFESAGVIESRSSGMKGTYIKVLNDVVFDELDKIKKQNQKKMAKYLVIVESPAKVKTIKKFLGKNYEVVASNGHVRDLPKSQMGIDVEHDYEPKYITIRGKGDILAKLRKEVKKADKVYLATDPDREGEAISWHLSQALKLDGKNVRRISFNEITQNAVKASLKQPRDIDMNLVNAQQTRRILDRIVGYKISPLLWAKVKRGLSAGRVQSVALRIICDREDEINAFIPEEYWTLDAKLKADGEKKPLTAKFHGDENGKLAITCREEADRIMDEIRGERFEVLEVKKGERVKKAPLPFTTSTLQQEASKTLNFPISKTMRIAQQLYEGVDVKGQGTVGLITYLRTDSVRISDEADADARAYIAQNYGEEFVATQTVTQKGGAKIQDAHEAIRPSDIARTPAVVKESLPRDQFRLYQLIWKRFAASRMASAIYETTNVKIGAGKYRFGVAASKVSFEGFMSVYTSEDDEKDTNNVLLKGIDEDTKLTLDTFDEKQHFTQPPAHYTEASLVKTLEELGIGRPSTYSPTITTLLGRRYIVKEAKNLYVTELGEVVNQIMKESFPSIVDEHFTANMESLLDSIGEGAVNWKTVVRNFYPDLEAAVEVAEKELQKVKIEDEVTDVVCDQCGRNMVVKYGPHGKFLACPGFPECRNTKPYLEKIGVPCPKCGKDVVLRKTKKGRKYFGCENNPECDFMSWSRPVAEKCPKCGGYMVVKGNKIACADAGCGYTRDRKADEDTKMNYAYWFANIPGLSNCAKISIHEKVGNAQDIYFLSEKQMENMQLLAKEIQAVRAAQKTDMEEAYAKMCESGISFVSLEDASYPKRLRHIANPPYGLYVKGCLPQGETVAIVGARMCSEYGRTVARELGRMLAARGVGVVSGMARGIDAAGHQGALDVGGISCAVLGCGVDVCYPKSSRALYEEILERGSVVSEYPPGTQPIPGYFPQRNRIISGLVRAVVVVEAKQRSGSLITADFALEQGRDVYAIPGRITDALSAGCNSLIRQGAGAVSDLESFVQELAPDPGAGGETCTFEKLLLEKEERLVYSCVDLRPKSMEELLEETDLSVPELAQILGILLKKGFVTEAFKNCYIRRIMYSRVATATIRGIQSVPVCVEADVSDGMPVFEMVGFLASEVKEARERVRTALRNVGCALPPRRITVNFMPADIRKSGAGFDLPIAVAVLAAMGRLPHAVLDDVLIVGEIGLNGVVQPVHGVLPMVAEAKERGIRRCIVPRANRKEAALVSGMLVCGVENIGEVMRLLEDASWEKYAAEEYNIEETQPAVLPDFSEIHGQRLMKRACEVAVTGMHNLLFVGPPGAGKTMVASRIPSILPPLAEAERMELSKIYSVKGMLSGENGLLTQRPFRAPHHTVSVQGLTGGGRIPQPGEISLAHKGVLFLDELPEFARETVEALRQPLEEGAVHLVRLGGSYVYPADFMLVAAMNPCPCGYYPDMQKCRCTQTAIHRYLERISQPILDRIDICVEAPALTFGELTGQQKEETSAAIQKRVAVAQDIQRERYRKEGFSYNSQIPATKIREYCALDKKQEQYMEEIYGKLQLTARSYHKLLRVARTLADMDGGGRICDRHLEEAICYRSFDRKFWERMKTFLSPLTPEQEMECLKKMKDGDLEAKKELTLRNMRLVAHVAKKYQNSDEDMEDLISIGTIGLIKAISTYKEDYGSRLATYAARCIDNELLMHFRSKKKTAREVSLYEPIGTDKEGNQIHLLDIVESDEPDVVETIETDRRTREVLALVPKLLSGRERYIIENRYGLYACKPMTQREIAAALGISRSYVSRIEKRALEKLRKGMESAGGGRMKAWKHFCTINHHKHLVMKGCFAVGLYKQGLLHDLSKYTPTEFLVGCKYYQGTMSPNNAERKDKGYSSAWLHHKGRNKHHMEYWIDYGVPDEGGDKGLCGMKMPLRYVVEMYIDRVAASKNYQKERYTDRSALEYYLHGKDFHVMHKDTRALLELLLYRLAVRGEPEVNTFIREELLAGKIPYEQKVLDQLAQPYHREAEKMAYTIKEGDYRQYGASAAGGGVVFTFEAEKEEDCSILLYGKDGGIRQELKVPESCCRGAIRSVFVAGLKAESLRYNYKISGTVVTDPYANRIIGRERWRDAGRVKNEFRVCGGYSDDTFSWGTDVHPEIPRHEMFLYKLNIRGFSMDAGIPAKERGTFAAVRDKIPYLKELGVTTVEFMPVYEFEELILKEKAVLPEYISWQVRKEDQIKPEACAMPERVNLWGYAPANYFAVKASYAKGQDAAVEWKKLIRALHENHMECVMEMYFPENVNQNLILDALRYWVREYHVDGFHLLGENLPVTQIAQDAWLRRTKIFCAGFENAVLWHPCRYPHLYVYNDEYLYPVRALLNHKNGGMDAFACQQRKQHQYHGFVNYISDNNGFSLRDLFCYEQKHNEDNGEENRDGSDWNLSANYGVEGRSRKQRIVRIRERQMCNAVAVLFLAQGVPLLYEGDETGDSQEGNNNAYCQDNPTGWVNWKKDERYAWFREFVARMAAFRREHPVLAADMPKQLSDAKGTGYPDLSYHGENAWISDLSGERQSLGMLYCGKEDGDGTEGEKFLYVGCNFHMGPTRLALPKLPGKKKWYLLMDTARERAPFLKEEERVDAPRIELCGQSVVILTGKMPDKRILPEKEKTIQKTSGNDIMYAKAIEQCQTGSFKNLPAKAKFFKIHGMKRIPTTDLKPGMFTARPVRTAAGQIILDEGCLLSAQTILHIRDYSIPEVWIRDSSDSSGGLHDYLQKQYAPVRSRSERIRQSEEYKIFSQKFDSCTTMLHTALNDCILRAKKLETDKLLAGTLDLFASHTTTLSMFDMLHNLRQIDDSTYAHSVNVAIISRMLGNWLGFSEDAQNTLTLCGLLHDIGKSRIPASIIGKPGRLTSEEFEQIKRHPLLGYELLKNQPLDPHIKNAALMHHERCDGSGYPFGLYASDIDDYASIIAVADVYDAMTADRCYRLGLCPFEVIAQFEQEGLQRYKPRYILTFLEHIAHTYLHNRVLLNNGQTGEIIFINKRLTRPTIQIAPSRFINLEEHPELYIQAIIMADNHNTNEDEDILVTLDLDDGSQVECEILTIFTVNEQDYIALLPLTEAGEPNEDGEVYIYRYAEDSDGNPSLDNILDDAEYEAVSDRFDEWLDEAEFNDMEDMSFNPSQREAIRHKDGPMLVLAGPGSGKTLVITERTRHLITEYGINPANILVITFTRAAATEMKERFLRLMGGKSSAVTFGTFHAVFFMILKHAYHYQAENIIREEQRVSCMREIIKRHRLEYEDESEFIAALLGEIGLVKNSGISLDHYYSTNCGEEVFRRVYSEYHEYLYAHHLIDFEDMLLYTWELFKERKDILAAWQKKYPYILIDEFQDINQIQFEVVRLLAGEQRNLFVVGDDDQSIYRFRGAKPEIMLRFEREIPGTKTVLLDTNYRSQANIVEDALNLIGHNKERFQKRIRAALPAETGVEYAVFEDQRKENLRIIRDICDAVERGKSYRDFAVLFRTNTQPRLLMEQMMEYNIPFRTRDRIPNLYEHWIAKDIFAYIRIAQGSRERRDFLQIMNRPKRYISRDSLDEDTVAFDVWEWYFREAEQPWVAERIVTLEHDVMQLRRMNPFAAINYIRKGIGYDEFCAEYADYRRIRADELYDVLDELQESARGYEDYDGWFAHIENYTRELERLYQSQEKQSESVALSTLHSAKGLEYENVYLIDVNEGVMPYKKAVLDQDIEEERRMFYVGMTRAKKYLHLFSVKQMNQKDADISRFIAEAGERLSPPCRMSKVRTRFAPSPTGRMHVGNLRSALYEFLIAKHAGGDFMLRIEDTDQERYVEGAVEIIYRTLQETGLVHDEGPDKDGGYGPYVQSERMKTGIYMKYAKELIEKGEAYYCFCDKERLASLKTEVVEGKEITLYDKHCLHLSKEEIEANLAAGKPFVIRQNIPNEGTTTFHDELYGDITVENAELDDMILIKSDGYPTYNFANVVDDHTMNITHVVRGNEYLSSAPKYQRLYDAFGWESPVYIHLPLITDENHKKLSKRSGHSSFEDLLEQGFLSEAVVNYIALLGWSPEDNREIFTLDELIKEFDYHRISKSPAVFDYTKLKWMNGEYIKAMDFDRFYEMAEPYLREVIHKDMDLKKIAAMVKTRIEVFPEIRDHIDFFEELPEYDIAMYTHKKMKTNAETSLEVLSDVLPLLEAQEDFSNDALYATLLKYVEEKGVKNGYVMWPIRTAVSGKQMTPGGATELMEVLGKEESIARIKKGISMLQKMKKKSYISTKFIILIPVFILGFVSVVSNILAVTNIKRVNANATQIANGYMSCISELGDIQKETLLIHRLGLSHIVATDLNTMISLVETIRSEQETLETYLDDFQEYVTDDNKAEYDALVSNYEGMKYELANLMAYSANNDNEAAYALANGKIADYSSAMQESIAAIRTNVSENADVAKEQLAAVYRTSIAASTASIIISVAALLATLICVFRLVIIPLLKTQKEITNIIEDIDKREGDLTRRVSVHANQEVAAVGNGINVFMDKLQDIFKVIVNNSTRMESVVGEVRDSVVTSNGSVSDLSALTEELSATMEEMSANASLINTNTESVKQEVDQIAERTSEINAYTREMKEHADSMEASARENMESTGAKVNEILTVLNQAIEDSKSVNQVNSLTDDILNIASQTNLLALNASIEAARAGEAGRGFSVVATEISQLAAASQEAANHIQQINRVVTEAVGNLTEHSNGLVQYMNDSILPEFEAFVDAGSAYREKATHIETSMGDFTEKTEVLKKTMAEIADSINTIAHAIEEGVKGVSSAADSTQVLVGDMEDITRHMDENQHIAADLKRETEVFKKLMKKHVIAAVAAATFVTTAMSGCTGADTTAGGESVNGEPSVLQTEAVMDSTELSGDAAEDDGKVTLTVWAEEANFDVLQEMIDSFEQKYAGQEEFDIQLAENADAETRKTLLGDVHNGADVFPLPDDQLTSMVAAGALEPVPNADEIREANLDEAVAAASVNDTLYAYPMTADNGYFLYYDKNYLTEEDVQTMDGLLAAAGAVGKKVTMDWSSGWYLYAFFGNTGLDFGVNDDGVTNYCDWNATEGSIKGIDIEEALLAIAQNPAFLSCTDTEFMEGVQDGTVVAGVSGVWNASEIKKVWGNDYGAVKLPTYTCAGQQIQMASFTGYKMMGVNAYSKHKDWALKLADWFTNEENQMLRLEERDQGPSNKNAAASEQVQAVPAIQAVIAQAQYGKLQRVGNSFWDATTEFGNLMATGSTNGTDPQEVMDTLVAGITQSTVQMSGLHALDLIVLGCILLWIILALLYMGKRKNDKEDCGCCGHCSSCSGCKSGRKDKKNMIFALAGNQNCGKTTLFNQLTGANQHVGNFPGVTVDQKMGEIRSTKNCSVVDLPGIYSIRPYTNEEIVTRDFILNEKPDGIINIVDATNIERNLYLTLQLLEMHIPMVLALNMMDEVRGNGGSIDYRQMSQELGIPVIPISAAKDEGIEDLIAAIVEVAGKKIPPKVMDFCEQGPVHRCIHAVSHQVEDHAVNIGMSPRFAATKIVENDTDIIERLALSENELEMMEHSIAEMEKDCGLDRNAALADMRYTFIEKVCQKTVKKCQESREHIRSVKIDGVLTNKYLAIPMFLLIMFLIFWLTFHVVGAALSDWLAVGIDAFTAVCDRGLTAYGLNPVVHSLLIDGVFAGVGSVLSFLPIIVVLFFFLSILEDSGYMARVAFVMDKPLRKIGLSGRSFVPMLIGFGCTVPAVMATRTLSSERDRKMTIMLTPYMSCSAKIPIYAVFAAAFFPGNEAVVMILLYTAGIVVGILSALVLNHTAFRGNPIPFVMELPNYRFPSAKSVGQLIWDKAKDFLERAFTIIFVATIVIWFLQTFDLKLNVVTDSEKSLLALVGQWIAPLFGPLGFSDWRVSTALITGFTAKEAVVSTLSVLTGTATANLSRVLGSMFTGRSAASFLVFTLLYTPCVAAIAAVKREMGSGMRAFLVVVLQCAVAWLMAFAVYQIGGIFFMTLEELPIGKRAAITAVGGEGTLRCRLLDMGLIPKTAVEVRKVAPMGDPIEIRIRGYELTIRREDAAKIEVKPEEEKMFPETKNSITPECRLTMQKHHISISENEYQYQKRKGVWKIMWNYERRLQYPVNITSPNAKIAQIILSQYGGPDGEAAASFRYLSQRYSMPDRKVAGLLTDIGTEELAHLEMVASIVRQLTKGLSAEELEEAGFAPYYVDHTAGIWPQAAGGIPFNACEFQSKGDAITDLFEDMAAEQKARTTYDNILRLVKDPEVCDPIRFLRQREIVHFQRFGEGLRMIQDDLDRSNFYMCNPEFDPGCGKMNQMTQMNQAQLLHWINMVSFAVVDIAEYLDTHPIDAEAICYFNHHIEMRRNAMQVYADKFGPLTIDTANPDAYWDWAKQPLPWEGGGCMRNYNAAGNTRSRCACEPDAASDRQPEYVVAMAYVPWQHFKTTYELDKALETGTIFPELDKPFLAVGRGCRRCMFFWKRKKKEPDFESKMGELNTTVLSKKDYKNTGKIEQYVVERLEQMIELTKELDDEKEEYRIVTSYLNDIETLEKIPKEERDKISEIAVNVVQLNKARTEFLNSSKKLSDAQFTQLEQQERELPEAIKRFKTNELHRDTLQRDMKYLEREKSEWNLRKEYLDHQQKKLKNVLYIIVGLAVTLAVVFGILQIILEKDFYYAWMGLIFATAVVVCGIYMKIQNDLSEIQVAERSQNRAIVLLNKVKLKYINVANAVDYACEKYHVKSAGELENQWQYYLEAVKERQKYQRTNEDLEYFNGRLVRMLSNYQLYDAHVWVTQAVALVDPKEMVEIKHGLIGRRQKLRARIENNLSQVNEQKEEAEQLLDKVGSMRPQMEKILNAVDKINEGDMGELILCNQNMAAFPYYVEEAAIGVYSLEELSYYICHNVYLLRSDFMNEDLCNWLERELKLKDAADALREIVRKGGTLSEFVTCLLSQSGYCDRMQIAQIAQQIAELEHKSEYECSKIRADRYVTNGRYAAAIAAYRTLLANQAAENPILVGNVWHNMGKAYTGLFRFREAADCYRKAYGLNENPESLRECLYAYRCLHDDDGFKNTAAECGMTAEEAAEAAHRLSELSRTEEIRQFEEQVDGLFADGQEDEIAGMLAEWKDTYRKNCRIMEHRFYLGIDLDDQYAVISSYELNKKEPETFSAIAGSEIYQIPALITKKKGIGQWFVGEEAVRLAIAQGEEANGRLLSRAVGGEKVFVDGETYPAEELLTLYLKKLIRLACGPDRRWEPERLVICMEKLSREATELFLSMAPKLGIDREKLQLLDRKECFYYFAYHQVPELSMHDVYLFDYRREDIRCCRLYKEKRTTPQLISLAEEVRRMNADSRDENFLGILKDCFRGHIVSSVYLTGDGFDGDWMKQSVAFLCQGRRAFVGKNLYSKGACYAALCSEQQENWDYVYLGDNEMKVNVSLKVRNMGKAEFYTLISAGDNWYETQGMCEVILAGTPEIDFWLQPPGTREAKVEKLKLLDLPERPDKATRLRITAKPVSDTKVWIQIRDLGFGELFKSSDKVWDYRMEFSEENPMRKRIQQLARGKFQYARPLLSFSADKVDIEVTEGRDYTGDFIITSTNHVPFRGVVYTSDSRMECLTPQFEGEEVRIRYQFHSNGLIEGDIVKGDFFLICNQGEYNLSFVVSVSRLYADTSAGRIKNLNDFTGLAKSSAQEAYHLFYSGHFKNILKPSEVRERLLYDGEADGTASWQKVEEYLRGCRQKKPVAVTLLADHASFEQVAGDRRESLKLHRDEWGYLSISIESDAPFLLPEKSQLTDEDFIGSTLEVPYYVKKAAMHAGKNFGRLSIVLPEQTLTFEVCATTDGAKAVSEEHLELQRGRMRLAQLYIDYRLKKIVTGAWANQSVELLDHMMAMEPECEMYALMKAQALIVNRQKQEASWIMEDYKRGCRDRETPEWGYYLYLCTLIEREPSYVDKLTDEIELLFKKNPKSSLLFWILLFLRESYYYSSPRKYKAIEAWIEGGCSSPYLYLESYYLIWQDPYLLTRLGTYELKVLRWAMRQGVLTKELAQQIRHLLPEVREKSRVLYEILEAAYQVEPEEEMLSAICAYLIRTQCYETEYHRWYELGIEQKIRLTGLYEAYLMSLDAREVGGVPRMIQMYFQYDSTLSYTQKAVLFVNIIAARTKQPEVYQKYQRTMEQFAMAQIEAGHINDHLAVIYDEMLPKGILDEELAHSLAPLLFTHRISCTNRQIARAIIWHEEMKMPQSVSFVNGTAYFKAYTPQYSIVLEDTNGNRFCSSVVYQDEALMYPERYVGQCLSLAPGENAYLLWYMSRHMEPEAWSDTEKTYALQLLQSGRLSRTYLVRLALALISYEKKDGRDFSYSEGELDLMKGQLTEALSDVSVRRQMAALLTENHLYEKAYQMVQIDGYDYLKTEWRVSLCSYAIADHGYEEDDFLLGFAESTFRQGKYSDVMLIYLCKYFNGPTKQMAELWKAAGEFQIDTFDLEERILTQMLYTTDYTPHMEEIYESYCAGGGRDLVCMAYLSYFANMYLTEDAVVPEHVFRQIRERYLTGGDLNRVCRIALLKYLSENHLSERDRKIADELLDTCIRHNLYFAFFRKFDEKLLRKYQLTDKFFLEYHTAPGQQIEVHYRLEAQQEYLADELTEMYDGIYVKDFILFFGEKVQYYILESQTADGQIGASGCLGNGDIMEEGSGDRYAWLNEMLLACTLDDREKLAGKMKRYYGMTKVTEEAYRLLMIKHKDHFHGSDLEKIEEIYGIKKEEIVSFSANVNPLGVSPLLKHTLSDQIDAITSYPDREYTSLRRCIAAYCGTETENVIVGNGSTELISLFIQVEHPKKALVIGPTYSEYEREIALGGGTTLYYPLREADDFKLNVEDFLSHLNESIDLLVICNPNNPTSSSIPRSDMRHILDVCKQYDIYVMVDETYVEFADNMAELTAVPLTNYYNNIVILRGTSKFFAAPGLRLGYAVTGNRDLIKSINTRKNPWTINSLAVIAGETMFTDSAYIKETKSLISSERARLCKLFNKNPDFKVYDPSANFVLVRILREDLTSQDLFDRAIRQKMMIRDCSTFPFLDNKYIRLCFMRPEDNDRLIRCLFHQNMSKRGRDTEWDASCGMEEIHEFCFKEFAAVCSIPELSVLGMGQTSGSDRNYIYKDKSERYRYMNTFYIFAVVILWVLFGVYLLAKLASKSIAVGTAVGNVVLIILFAVVELAFYLRNKSDVRLKRVVAIGVGVEFALIGMQTDAEFIYFALIAILTLQIPYYDMKRYKQTCIAFTALFTLVEVIRVIKGIGLQDVDSLCRVLCVYLLFFIMYRVGSIAKTFSDHALGSAASEGEKQKVMLEGILDISKTVRDESERSTSLVDELVHTSETVAQSMQEISSATNTTAKNIEEQNNMTQSIQSAIDETGERSRKMVDVATDSNENIQENLQVMEELKNQSEQIAATNHEVTESMTRLQNKIKEVEEIAGMILNISNQTNLLALNASIESARAGEAGRGFAVVAEQIRQLAEQTKKSTEEITTIINELNENARDVMTSVESSVEATESQNEKIAVAAESFERLNENMSQLIGDINEIAGQITGLSDSNNRIVENISQLSAATEEVTASAEQVREISEQNRNYAEEVKGAIGTIRGRTDEMKQFTMEAERVKTKKVSAADRIPEKTGRKKWSVLFLESLLKEAKEREAESEKARPAVDGESWIRPGRDTFEHSEDPEELWCESYEDIMGIVRMVGKWKANILYQIANAILRDYHEKKLDEDGVGELFGLCCQKCKDTGGGTGRKTEPQITETVLEFFLRANARMSVFSMERAGKRLTARCGLNWSGTTYYDAWYFYRCAQMHRRLFVVAGRIAAELGEKVSSPEELEQRTQFAAVGGLTFHGVFGWVQQKDNYPVNQYGLKNPGIEPPHHFVYLYRNHYSEAERPCVQFLETLMREQTACAQRKELWRHYTIQDGREYHNGMSYLLEGSLADEQDEKMYEAALLFLQNFRLYRVDGCVEFLYTAYEKEWGMRIYNRDQSAILGARNNRLAKMRAFSSSTKTRASSKGTTQSAPKSKNYRTSAWMQFLNQFQNGTAVSGDKIVENQKKSYDYEITGLAAERVETHMKRFLEEGEKSLYQEGEDTGKQLTKEMESFVSDYNMMIRKIGDLSDSVDETYAKKLKTEISARETALKQIGITLQRDGTLLLDKTVFQTVKPEAVQKIFGDKSTLSNRVQVLASGVKSNCRKQAAALLATSYTTSGNYSRYASDSNQTRQTGSRYNAKGMLYIAACGNEASVRKYLKEMEGEYVREDVQILCGDEIEGSGTMPDVLFLSDSGIEECQKKIPVWFRRKAFDNAGELKQRKAGAERKRPLLIKTDGTYCCVDQKTILYAESVGRKVVLHTNTGIIAYYARMKEVEEILGNGFFRCHRGYLVNFAAVKSFEVGTILLKNGESILMAKQKFNDFASAYETYLNERMAWTLDSDRPIFLQIVERIQTDIVSGRYQPGDKLPSVRDLAAEASVNPNTMQKAFAELERTGLVYSRRTSGRFITEDCHMIEQLKTSLATEKMEEFLAQMRQLGFQNDEILSLMNQTMKGEKQMSTLLECKDLTKCYGKKTAIDHINLAIESGHIIGLLGPNGSGKTTLIKMINGLLAPTSGSIFMQQNPIGAESKKHISYLPDHTYLNMNERVRDIIRYFSDFYEDFDEKRAYDMLGKLQIDASDRLKTMSKGTKEKVQLILVMSRHADLYILDEPIAGVDPAARDFILNIILSNYEPEASILISTHLIADIENILDEVIFIDHGQIRLTASVDDIRMNNGKSVDALFREVYRCMLKKLFKYEFKSTAKIMLILYAILIITTSVGSVVLYSLDLDQAGESKLASILSVSAIVLYILAIFAVLIVMYVYLCVHFYRTMYSAQGYLTHTLPVKTLAPFHVKLITSFVWMFLSMALMTASIVALIASASHGTAWQDFTSAWEELFGQDVFSFHFIFQMVLGVICSCLTYLLWVFASASIGQLFSSNKVAASLVAGIVLYFMQQIFSMILMFGTGMFQSGDNSVNFFAVTTTIDNTTTSTASILPSSLFVTSNIYSIIVIVILYLVCARIITKHLNLEMDVMTRVPVREQDPQVRAANFEEVCLGYNAEEAMAEATRCLNCKNAQCMKGCPVSINIPAFIAQVKEGNFEEAYHIISESSALPAVCGRVCPQENQCEGKCIRGIKGEAVAIGKLERFVADWAREHGIKPKKAEKLNGHKVAVIGSGPAGLTCAGDLAKLGYDVTIFEALHEAGGVLVYGIPEFRLPKQKVVAAEVENVKALGVKIETNVVIGKSVTIDELMENEGFEAVFIGSGAGLPRFMGIPGEQAMGVFSANEFLTRNNLMKAFLEEYDTPIKAGKKVIVVGGGNVAMDAARTAKRLGAEVHVVYRRGEEELPARKEEVHHAKEEGIIFDLLQNPTELLVDENGCVKGARVIKMELGEPDASGRRSPVEIPGSEYEIEADTVIMSLGTSPNPLISSTTKGLETNRRKCIVAEEENGATSKSGVFAGGDAVTGAATVILAMGAGKAAAKGIDAYLSTKMYPIVKKEKLADKIYLMDVKAPRVAQYCEPGQFVIVKIDEQGERIPLTICDYNREAGTITIVFQTVGASTQRMVSLEQGDAFADFVGPLGCPSDLIDEDIEELKKKKIVFIAGGVGTAPVYPQVKWLHEHGVDCDVIMGSRNKDLLILEDEMRAVAANLYVTTDDGSYGFHGTGTAQLQELWDQGVRYDHCVAIGPMIMMKFVCKLTKELGIPTVVSMNPIMVDGTGMCGACRLVVGDEVKFACVDGPEFDGHLVDFDQAMKRQQQYKTEEGRAMLKLTEGDTHHGGCGQCGMAAERESMLIMKNVSKTFNPGTVNEKCALNGVNLTLGAGDFATIVGSNGAGKSTLFNAITGAFFPDRGLIMLGGEDITYQQEHVRSKVIGHLFQDPLKGTAPHMTIEENMALAYLRTTTSRNAYFSRINAADKKKFREQLALLDMGLEDRMKQPVGLLSGGQRQALTLLMATMVTPKILLLDEHTAALDPATAEKVLHLTRQIVAERQITCLMVTHNMHQALTLGNRTLMMNAGNIVLDVAGEERAAMSVDDLLEQFALRAGKALDNDRILFSKVETQEMGSIITLSIVQSALELGFIYALVALALFISFSILNIADLSTDGCFTLGCAVCASVTLAGHPVLGLLAAMAAGVCSGFVTAFLQTRLGIQSILAGIIVNTGLYTINIAVMGFASNLNLFACDSVFTWAKDAIGGTWYKLIVAAVIVALVGVLISLFLNTRLGLSIRATGDNPDMVRASSINTGMMITIGLCVANALTGLSGGLLAQYQKSCDINLGTGMVTIALASLIIGETIIGKGSMLKRVIGVILGSCLYRFIVAVALRLNVPAECLKLVSSIIVAVAIAFPYLKKQAVFYRQKRAAKAENEQYIAELLREERKGKGGNAMKKKMMTAVLAMTMVATAVAGCGSSSGSGTTVELTNEAGGDAQAEIQKAEADQTAAEGTVYKVGIVQYVDDASLNQIEKAIEAELTAKGAELGVTFDYADYTFNGQADQSILTQIAADLVADDVDLIIPIATPTAVVMQSATEENQIPVVFSAVSDPVGAGLAADVNAPGSNITGTSDAIDTAAIFDLMLAANPDTAKVGLLYDKSQASSLGAIEDAKAYCDEKGIAYVEKTGTTSAEVQAAADALVAEGVDAVFTPQDNTVMTAELAIFEKFIDAGIPHYTGADSFALNGAFCGYGVNYEELGTKTADMAVDILVNGADPAATPIETLERGIVTVNTETAEALGLDYSMFKDMCSEVIETVTAEEFEMKKLGLGPKMILSFLVAIAGSVVICGVITYSRTKNVLNSNMQLTSEQTLESALNSLQTYEKTISLPVDLLTRKTSIKQLEYEDQFDDYIANVQDELVAACKVTQGAVRSYYATSSGKLITGWVKYEDNGDKTAMNTIEENVDLSGEDWYVNCQGRKAKVNSIFSYITQPYEDPQTGGQIFTVAQEVKYKDVLMGVVAMDIDAAQLENYIRNIRILNTGFAMLIDADGNIVIDSDKNTFADGNVTGLEFWTPISGELKSLEEQKSALEEAGDESASDITLESVYTMRADGMDCAVTAMTDQVTGWILLGCISDVENTGNLAKINGALVFAGAFGVIFGIVIALITAYSLVREIKKIERATAAVAEGDFTQTIAVTRGDEFGALETHFNDMVKDVSTVIREVEDKSRHILETSDHISEIAGDTRSTMGQVAEAISSVADGAVKQAESTQEASSEVDNLKNSLESSRDCVSEINQMTEETNRISSEGLGSVKDLIEKSQKTVEKSSMSLAVMNEMIASIDKIFYISDAIADITAQTNLLSLNASIEAARAGEMGKGFAVVADEIRKLADESKESTDEIKKIITEITDKSKQVEETMQENEELQSEQQKAIERTEEVFRQIITQIEQLNAGMENINRLNADMSSNKDTVVSRMEAIASVSEQSAAATEEVNASTDQVNTTMADITDYTKTLQNIAQDLEQTIEKFRLMEIMQEIPIYLFTGFMDSGKTTLIKETLLENGFADQGKSLIICCEDGEVEYDEAELKKINASLVMVENEEDFTADFLNAINMKYLPDQVFIEYNGTWGMDTLTETELPRGWMVVQSLATVDATTFDMYLANMRTMIMEQLFQADVVIFNRCDDSTDKGKYRRNVKALNRKAQLVYERADGSLDEREEELPFDISGDELEITDADYAIWYMDCLDNPKKYEGKKVSFLALVYNPDKLKKGIFVPGRFAMTCCVEDITFIGFKCKYPDEDKIPHKSWIHITAQIKVEFAREYKGKGPVLYPISITPAEKPEDELVYFSMTKIDIISGFLGAGKTTFIKKMIDEVFTGEKLVLIENEFGEVGIDGGFLKDAGIQITEMNSGCICCSLVGDFGRNLHEVIGKYHPDRILIEPSGVGKLSDVMKSVIDVEKEEDVKLNGLITVVNALKASKQMKAFGEFFNNQIEYATTVVLSRSQNATPEQLELCVKQIQSINDKAAIITTPWDSIRGEQILKVVEGQDSLERKLMAEQHAKEEAEEHEHEHHHDHDEHDHEHHHDHDDHDHEHHHDHDEHDHEDHDHEHHHDHDEHDHEDHDHEHHHDHDEHDHEHHHEHGENCTCGCHDHDHEHHHHHADEVFTSWGKETPHKFTKAKIEDVLKTLCETDDYGTILRAKGMVEDENGSWIYFDMVPGEYELRDGEPDYTGRLCVIGTDIDEHRLEELFGIAMSKNFKKMLSYYKPYRCIFWADMFFATVSAAVALAIPLVIRYVTYTLVYEDKAQIMFQIKIIAAALFAMVAADCYSKFFISNYGHVMGAKIEYNMRAEIFEHLQKLSFSFYDNQKVGQLMSRITTDLFDITELMHHGPENIILSAIKIIGAFVILVNISPLLALAAFIVLPFMFAYAYYLNGKMRRAFRQNRVKIAEINGQIEDNLSGIRVVKSFANEEIEKKKFKIGNAGFLSAKKNSYHYMGSFQAGLGAFTTLIQVNVILAGTILIANGKVNVSDLVTFVLYISVFTDPVRTLIDFTEQFQNGYSGFERFCEIMEIEPDIKDRADAKELTDVRGDITFEDVSFQYEENTEQVLQHINLTVPAGSYMALVGASGAGKSTLCSLIPRFYDVTEGAVKVDGTDVRDLTLKSLRDHIGMVQQDVYLFVGTVYENIRYGRPDATREEVIEAAKNANAHEFIMSLPQGYETDIGQRGIKLSGGQKQRLSIARVFLKNPPILIFDEATSALDNESEKVVQDSLEKLAKNRTTFVIAHRLSTIKNAEKILVLTENGIEEEGTHEELLAKKGIYEKLYHMQFQKQMNPRQMHYETLAGTIIKNLARRRMEGYYCATVEDAEKMAFSFLTPGCTVSFGGSMTLEDTGMLTALRHDPGITLLDRAQAKTPEETKKIYHDALSSDFYFMSTNAITKDGELVNIDGTGNRVAALIYGPEHVIVMAGMNKVAANVDEALSRVHGTATPMNCKRLGKNTPCSATGVCSDCLSPDCICNQVVITRRSGIEGRIKVILIGEELGYMSSVIVKENETLDSALRRFKRNCAKAGIQQEIRKREHYEKPSVKRKKKSEAARKRKYNMDERDRGQGSLSDKVKGSYRRVSVVMYVTLVIAAIAVFAAAYVPKQFSLAYTILVLIVFLITAVNDTRLIQRNSQKIVDAVVEPVTELTKVAEEISKGNLDVEVQYSSDDELGKLADSFRVTVTTLNKIIEDLGYILEEFAQGNYAVRSNCKESYVGEFENVMTHLISMVTDVSGTFKQIRESSDQVAAGAEQLAISSQDLAKGATEQASAVDDLVESVATVSEQVEANSKSTDVVHDKAKEVGMEANVSQQKMQELTEAMERISGTSQELVSVIGQIESIASQTNLLSLNASIEAARAGEAGRGFAVVAEQIRMLAENSAQAAETSRHLLEANQSEVDRGNTVTQQTAESLNKVLTELDDIIQEVANIRVSSDQQAESVKRIANGVKDIGDVIQSNSAASEETSATSEELSAEADSLDGLITKFKLREEMLEEEVVKKFYGENELRRMYLEFFESKGHLKMNSFSLVPHNDNSLLLINAGMAPLKPYFTGQEIPPRRRVTTCQKCIRTGDIENVGKTARHLTFFEMLGNFSFGDYFKHEAIAWSWEFLTKVLGLEEDRLYPSIYGEDDEAFDIWTKEVGVPAERITRFYRDPKTGECDNFWEHGAGPCGPCSEIYYDRGEKYGCGKPDCKVGCDCDRFMEVWNNVFTQFEGDGKGGYTELSQKNIDTGMGLERLAVVMQDVDSVFDIDTMKAIRDKVCELSGKSYQKDALDDVSIRLITDHIRSATFMISDGIMPSNEGRGYVLRRIIRRAARHGRMLGIGGTFMAKLAATVIDESKDGYPELEEKKDFIFKVLTQEEEKFAKTIDQGLAILEKMEKEMQTAGEKTLSGENAFKLYDTYGFPLDLTQEILEEKGFSIDEDGFKKAMEIQKKKAHDAHKATNYMGADATVYDEIDPSITTEFTGYDSLTASSKITVLTTETELVEALSDGEVGTIIVEKTPFYATMGGQQGDKGEIRTASGIFQVEETIKLRGGKVGHIGKMTNGMIKAGDVADLSVDAKLRRDTCRNHSATHLLQKALREVLGTHVEQAGSYQDGERTRFDFSHFAAMTPEELKKVEAIVNEKIAEKIDVRTDVMTVEEAKKTGAMALFGEKYGETVRVVSMGDFSKEFCGGTHVANTGDIVVFKIISESGVAAGVRRIEALTGDNVFAYYKKEEEELEAAAKAAKATPATLVEKIGHLMAELKALQSENESLKSKAAKEALGDVMDQVVEVKGVKLLAVSVDGVDMNGLRDLGDQLKGKLGEGVIVLASASDGKVNLVAMATDDAMAHGAHAGNLIKSIAGKVGGGGGGRPNMAQAGGKNPAGIPDAIAEAKTALEAQLAMAFLGWFVHYVLIFVVLVVVAGLGIFAGKKLSDRKDAKNAGETGNVEETKMQVIFIHHSCFLVEVDEKVLIFDWFDGDRVEGYHFGGVLPEYEPDTPVYVFASHKHRDHFDMDVLHLAEKYPKIRFIFSKDCKMSPHFLVKHGFAPEVAKRIHYVGADEKCRVDDLNIETLRSTDAGVAFYVETNGAAFYHAGDLNDWHWDGAGDLINGSMRTNYRSQIRRLSGRKIHLAFVPADPRLMEHQFDGMNYFLEHTDADYVFPMHMWQDYSALPDYRKRISNAAMAERVVEINHENQIFEILEEMNTRFYNAKILTLADHHKFEITEGELWVKGNTICYIGDGTDTADVCKEGEVLVWDREIDACGNLLMPGFKNAHTHTAMTFLRSYADDLPLQDWLNQQVFPREGQLTEDDVYWLNILGIMEYLTSGITSNFDMYFFPPVDAKASADTGFRTVQTSGLNNFGGTVELMEENYHIVNEMSDLTSFIVGFHAEYTTSKELMEGVAALAQKLKSPVWLHNSETKLEVAECKERWGMTPTQLTDSLGMYEYGGGGYHCVWFEEPDFEIFKKRHLTAVTNPASNLKLASGICPTKRFVDEGIAMAIGTDGPASNNCLDMFREMFLTSALAKVREMDAECVGADEILYMATAGGAHAMQLEDCDRLAVGKKADIVMIDLNQPNMQPENNIVKNLVYSGSKQNVKMTMINGKVLYEDNHFEIGFDPKEIYQRANAIIGRMKMNLVYEKLQKCYESYKAKIDFTPKVALVLGSGLGDYADDIRVADTLDYHDIEGFPVSTVPGHKGRFIFGYVGEVPVVCMQGRVHYYEGYDMSDVVLPARLMKLMGAEVLFLTNAAGGIQLGMNAGDFMLIKDQIASFVPSPLRGANVDELGVRFPDMSQVYDKELQLLVKKAALGLDIDLKEGTYLQLSGPQFETPKEVAMCRTLGADAVGMSTACEAIAARHMGMRVVGISCISNLACGISAVPLCHEEVQETADRVAPKFKALVTETIKSIGKMKNFIQGMYQKKHFARRLISVILAVIVMGFALSWLVLVNFGTDPCTSMNLAISGRLGMSLGNWQALLNCLLFIIVILWGREYIGFGTLANMFLVGYSIDFFSWVWSKVLPDGLFDSMAVRIGVLFPALAVFVVAAGVYMVTELGTAPYDAIPFLIVKAQKKVPFRVVRMVFDFTVIVIAWVFGAKIGLVTILMGFTLGPVISWVGEKMAPFFNEMQTLHLTGINKLLHPERDKRSATERIFDHLSHSNIGLNRGEATADTGSAASALDSFSVTQNISELLSPAYGMSEEEKKAYLAKIIAKLKSGKKLTSEEMRFLQAEDPQLYQQAARVQAMRGSLESGLAHSTSKEEAQSVYLDALTHISEDDPMKEYIIAAYDDAMKEFQKSDQYQSLPETKEDAAKQHTGSRHSHSMAQMIEITDFDAPELDVYARLTENQLINRHEPEKGMFIAESPKVIERALDAGYMPVSILTEKRHIEGEGQKILARCGEIPVYTAEFDVLTKLTGFQLTRGMLCAMYRQPLPSVQSVCKGAKRIAVLENVVNPTNVGAIFRSAAALGMDAVLLTTGCSNPLYRRAIRVSMGTVFQVPWTYLGEETKPETVRNPDSEEEKEPGTGIERNLEPEEKADSGNWQKQLHELGFHTVAMALKEDSLSIDDPKLMNEDKLAIVLGTEGDGLAPETIATCDDTVCIPMAHGVDSLNVAAASAVAFWQLGRQAHKDNCCNMNSNYQLWEMLNMMGNKEKRVWRGYFCRTDPFEKDAGTKIRTESQIKPGKRKGKMHYFVGQGKKEAEKEECNRETESRKKTETRGGGKQAETVAESAAKPVENMRRTLQKAMDISSKKEFDLYKDIQNRTDGEVYLGIVGPVRTGKSTFIKRFMDLMVLPYMEDVHSRQRTIDELPQSAQGKTIMTTEPKFIPKDAAEIALEDDTRIKIRLIDCVGFMVDGATGHMEGSTNRMVHTPWFDHEIPFVEAASIGTEKVIRDHATIGIVVTTDGSIGDLPRENYVNAEEQTVQELEEIGKPYVVVLNSTRPYSEETVRIAEGLREKYQTAVLPVNCEQLRKDDVFHILEQILYEFPVARMEFYIPKWTEMLPPDHPMKAEIIQSARTILGGMRKVKDIYAQDFTPEHYVSRMKLEEVDLASGCAKIRMEVAEKYYYENMSELAGVPIAGEYELIALVKEMSQRKEAYEKVADAMAAVQVKGYGVVGPGLSDIKMEDPVLIKHGNKFGVRIRATSPSIHMIRANIETEIAPIVGSEEQANDLIAYIREGEKSEEGAWETNIFGKSIGELMENGIRGKISMMDDECQMKLQDTMQKIVNDNNGGMVCIILMLYFIVNEKSRSGRGAQIWKEVQRELVKRGIHYRHYVTEHEGHATRLAVEICAKTDDDICLAVVGGDGTANEVINGITHPEKVRFGLIPTGSGNDLARGLKLSGTPLENLARMLSCMQRGREACTVIDLGEVAWDDCEKPRKFAISAGVGLDALVCKKALTSKLKVFLNKLHLGKLTYLLITVQSLFSMQTTEAAVRLDETPERKLDRIIYIAAMNFKAEGGGVPMAPKADATDGKLSICSVHGIPKWRTFLCLPFLVAAKHTGIRGFDIDDCGTCEVRLKDPMVLHADGEYCGDVTKLQFRCLPGMLRVMLMHISSLPSPYGIGTMGKEARKFADFLEKSGQKYWQILPICPTSYGDSPYQSFSSFAGNPYFIDLEYLCKEKLLKKAECESFPWGKKADKVDYGVMYESRYKLLKIAFERFLRAEPDDFEAFCEKEADWLSDYALFMALKDANGGNAWFSWEKDLKMRKPEALAEARSTYAKDIRFYQMLQYLFFKQWWELKAYVNEKGIEIIGDVPIYVAGDSADVWANPEEFYLDEDLNPIDVAGCPPDAFSEDGQLWGNPLFRWDVMKKNGYTWWTKRIAAMSKLYDIVRIDHFRGFDSYYAIPAKDKTAKNGEWRKGPGMDLFHTLEQKLGRLNIIVEDLGFLTPSVLKLVADSGFPGMKVIQFAFDSREGSNYLPHTYTEHCVVYTGTHDNDTLLGWMKTAPKESVKFAKEYLNLTKEEGYNWGMMRGAWSSVGELAVVPMQDLIGLGSEARMNTPSTLGGNWQWRATSDQITVKLAKRLYNYMEMYGRLWVGEDADRKEQMVTIKDIARESGYSVSTVSRVLNNRNDVSPDARKKIEEVVAKFNFVPNNNAKHLKQNNSKAIGVLVKGISNMLFASVVEEIQRMIEKTEYTLVVSYLDEDADEVEQAILLCRERKPLGLLFLGGNPEYFHREFSGVDVPCVLVTNRANEMHFENLSSVATDDIAAARCAVDQLFVAGHRRIGILGGDFDKSYTSHQRFLGCEQSFSEHGAVLDVEHCYEKARFSFGSACRAMKRLIGKFPDVTAVFAMSDVMAIGAIRALRDLGYRVPEDVSVIGFDGTSLAEYYNPKLATIKQQHQTLANRSIEILFGQIELKKEPIHEIVPFEFVNGESIRVIDERMAKNKKADNQVSAVRRAKHGWILTVFFSILAVLWLYPIFLVAMNSLKKKGFITRYPFALPDHRSFFGIENFIKGVQKTNFFAAMGNSVIITVGSVAVIILCTSMCAWYITRVHNKVNSTIYMLCLFSMIVPFQMVMFSLSKLANMMHLSNPIGIILVYLGFGAGLAVFMFCGFVKSIPLEIEEAAMIDGCTPLQTFFQVVFPIMKPTTITVAILQAMWIWNDYLLPYLVLDLKKYKTIPIVIQYLKGGYGAVDWGTMMAMLVLAIVPIIIFYAACQKYIIEGVVAGAVKGMEKSIKKYFPVFALPTLVAFTIGFIIPFIMGIYLSFCEFTTVTDAKFVGLKNYIRIFSDATFTHALVFTALFTVVSVLTINVFAFAIAMLLTKGIRGTNLFRTVFFMPNLIGGIVLGYIWQILLNGILANFGKTLTYSGTYGFWGLVILMNWQQIGYMMIIYIAGIQNIPGELIEAAKIDGATNRQLLRHVTIPMVMPSITICTFLTLTNSFKLFDQNLALTAGEPSNSSQMLALNIYETFYTRTGWEGAGQAKAVVFFIIVAVIAMLQNRLTRSKEVQQMKRKVLSVMLASAMLATMFTGCGDSSTTDSNAAATTGNDAAATTTEAADTDAAKTDAAGGSVYYLNFKPEQDQAWQDLAATYTEQTGVPVTVITAADGTYEQTLKSEIAKTEAPTLFQVNGPVGLANWKDYCLDLSNSEIYSHLTSDDYALKNDAGEVSGIAYVIETYGIIYNKTILNDYCTMDNAVISSPEDINNFETLKAVADDIQARLDEINDQFGYDLKGAFTSAGMDGSSDWRFKTHLANLPIYYEYKDKGIDSTDAIEGTYLDNYKQIWDLYITDSTCEPGFLSSKTGDEAESEFGMEEAVFYQNGTWEYSNLTNEDNGYLVTAEDMSMMPIYIGVDGEENQGLCTGSENYWCVNNQASAEDQQATLDFLEWVITSDEGRDSMANVMGFTTPFDTFADGYTADNVFIQADAAYTKAGKYSVTWNFSTIPSETWKDGVGSALLEYAQGTGDWDGVVTAFVDGWKTEYDATHEMECSKLGKTWIITDASCGMVRNTGFCVQNLSPHVYLELLSIYLLMTDGTEKCNPKIEENQREDRRAFRKFIVLLLVSMVVGGITGAFLTMAAKGQADIGAGITAGLQKIAPYANLVIAAALAVWMTGMLRGGRAEYRRWDGEEEQLIEKIERKLGIGVIVTNVALIAGFFFFAAGMKSTGIDSGWEEEVPWVKIAATFLGLIAVMVVTVIAQNRIVNFTKEINPEKKGSVYDLKFQKTWIASCDEAEQLQIYRAAFRAYTAMNYAALGMFLVCFIGMLSWNFGLLPLTMVLFVWLTGVIVYGVESLRMTGGRMPLYNHLKEYRAKINVNQHEMGQLVGVSRQTISQIERGDYSPSVTLALKIAKVFEVPVEAIFTYEEESEEEKMERESHLIMKEIIKHKITHNVNRLKTSLKWVVFAILSGVLVGSVGTLFYLCMALVTLVRTKNPWLIFLLPVGGILIVGAYRLLHDERDTGTNLVLSAIHSGDELPLRMAPLIFISTLITHLFGGSAGREGAALQLGGSIGNGLGRLFHFDEKDKHIMIMCGMSAAFSALFGTPMAAAIFSMEVVSVGIMYYAALVPCVISSLIAHAIATSFGVSPDGFPLGKIPDFTIGSAVEISILAILCALVSILFCVMLHGSDHLYKKFFKNPYLRVFVGGCIVVVLTLLVGDQTYNGTGINIIARCMDGTVRPEAFFLKMLFTAATLGAGYKGGEIVPSLFTGAAFGCLFGNVLGFSPTLCTAVGMSAVFCGVTNCPITSLLISFELFGYDAMPYFLLAIAFSYMLSGYFGLYQSQKIVYSKYKTNYINKKTHMSAGLRTQSVECSRPGKTRIIKDAGRGMVRNTGFYGQICLGQISSGTFGSYFSWYHSMADKFRGHHIVCTSLYEGKGYSGAFCENMTAVVERLRKDPDEELLLVAEPDMICANCPNRTEMNECVHNHNRVVNKDRRVIEFFGLEENRVYTYREMCRHARAAMNMDFFMENCGKCDWRKQGLCKYEDLLAQLDRCIEKEMKISTKTIVTVGMFTAVLSVLSILTIPMPTGVPVTLQTFAMALCGYVLGWKKGTSSTLIYILLGTVGVPVFAGMTGGPSWLAGYSGGFIWGFIFLTMLCGVGMAQKQIWLRVLLGLAGLAVCHLLGVIQFAIVAATPFPAAFVAVSVPYIVKDVISVVGAYLVAIPIRKALAAGNILEEKTKAAVMQQKKRILLLATGGTIASRKSDNGLKPQITPEELIEYIPQVKEICDVEAVQLLNLDSTNMEPSHWKLMVHAIWEHYDDFDGFVIAHGTDTMAYTAAALSYMVQNTKKPIVITGAQKPIDLEITDAKSNLIDSFLYAADDRSQGVQIVFDGKVIAGTRAKKVRSKSYNAFSSIDYPSLAVIQDMNIMRYIPMLPYEEEVRFYEKLDENVFLMKLIPGIRPKVLKSIFENYDCIIVESFGVGGIPQSIAEEFYRLCQEHPDKLVVMATQVAHEGSDMTVYEVGHNMKEYCRFLESYDMTLESVIAKVMWMLGNYDISSCDIEEVFYHSINYDLIFGKNRKCNMIRFNSDYTEGCHPAILERLAATNMEQTPGYGEDVYCAAAAEQIKEACAAPEAAVHFLVGGTQTNVTVISAALRHYQGVITAVTGHINVHETGALESCGHKCLTIETADGKLTAEQIAAYTDAHYADASFEHTVQPKMVYISNPTEIGTIYKKAELEAIYDVCKERGLYLFLDGARLGYGLTCRENDLTLADVAALTDVFYIGGTKVGALFGEAVVITNEELKRDFRYNMKQRGGMLAKGRLLGIQFLTLFEEKRYFEISAHASRLAEKIHDELKDMGVKFYVDSPSNQQFVILPDAVLEKLKDDFAFEYQARVDDTHSAVRICTCWATKEENVEALLAALRGLLRMKEYIAKVAEGENLTEEEAKGAMDIMLSGDATQAQIAAFLALERVKGETLDELAGFAVVLRDKAETISPKVDNYIDLVGTGGDRTFTFNVSTTSAFVVAAAGLPVAKHGNRSISSKSGAGDVLEALGVNIMADPKKVEECVEKTGIGFMFAQLFNKSMRYVGQARSEMGIRTVFNILGPLANPSRAKNMVVGVYSPSLTEKVATAMSRLGVERAYVVSGEDNMDEITLTGATTVSEIRDGAVTTFTITPEQFGMKRVSLEELRGGSGGENAKITRAILDGTERDAKRDIVLLNAGATLYVGGVAESMEAGVKLAAEAIDSGAAARKLKELVRVSNTMTDMNRIEARMNACSKKQEKAFITYITAGLPDLAATKEIIRAQERGGCDVIELGVPFSDPVADGSVIQDASYRAICGGVNVKKIFAMMQELRTEGVTVPIIFMMYYNTILHYGVEAFVKRCNEAGVDGLIVPDLPFEEQEELMTALDASEDTILIQLVSPVSGARIPKILAGARGFVYCVSSMGVTGQGAEFHKEVRSYLTSVREATDLPVMMGFGIRTAADVLPLADLIDGAIVGSYFIRLLEEQGFAPEAAETYCRTFKKELNAMNRKAYYGAFGGQYVAESLMNTLEELDAAFEEAIRDPEFLKQYHYYLEQYVGRETPLYYAERLSEKYGMKMYLKREDLNHTGAHKINNVIGQILLAKRMGKKKVIAETGAGQHGVATATGAALFDMECTVYMGAEDIKRQSLNVMRMEMLGAKVVSVTSGSNTLKDATNEAIRTWAKTAEDTFYIIGSAVGPYPYPKMVKEFQSVISREAKKQILAAEGKLPDVVMACVGGGSNSIGMFADFIEEKGVKLIGVEAAGKGIETGEHASAMALGEPGVLHGMRSYLLQDADGNVQLAHSISAGLDYPGVGPEHAYLKECGRARYVAIRDDEAMDALMELCRLEGIIPAIESAHAVAYAMKYARERKEAVGEKQAAKETMVICLSGRGDKDVNTIADYLAGKGYLNMTKIKICGITGEDEIAALNETGVDYAGFVLYEKSKRYVTVQKARQLFEKLNKGIRKVAVTVAPERALIEDIGRAGFDLLQVHGVDAAEAERIAAQTKLPVWLAVNLRDPAEVRRWRREEYHRIAGIVLDAGEYGSGKTFGWEQDGQDEMCCAVRAFREKLLAEGRTFVLAGGLNAENVAEGIRIFAPDVADVSSGVETLCDGMRTKNIIRIKKFKKAVQKTEGVMILDQIVSDKKRRLPEHKRRIPEQEMRKLAEAYESSHHDFKGALEGDVISIIGEFKKASPSLGKIKSKINLLDRVEEYNASVDAISCLTEEDHFDGSTAYLEQIRQMTDLPILRKDFMIDPYQFYEARAIGADAVLLIAAILDDVQMHEFYQLAGELGLDALVEVHDEAEMERALKLDAKIIGVNNRNLKDFSIDLQTTERLSRMVPQEKLLVAESGIVSDEDVEFLKACGVNAFLIGRAFMEAEHPGEVAARWKQRMILLIDNYDSFTYNLYQYIGTFTPDIRVVRNDAITIGEIEDMQPERIVLSPGPKSPKEAGICMDVVKHFYNKIPILGICLGHQCIGEAFGGTVSYAKTLFHGKQSEVTHCLDGVFTGIDTPVKVARYHSLAVLRDDLPECLKVTAQTADGEIMAMRHKEYPVVGLQFHPESIYTEHGKRMIENFLSGVIMKRIYKVYKKTVSIVNETPTAMYENLVGSRKGFLLESYDKNYDRYTFLGEPEELISSEGESLVITKKSGEREVRRGNPLALLKEYYDEFEIHKENDELNFSGGLVGNVGYDFIRYSEKLPEKNPDEIGIETIQLMLMKAFIVMDYVAETLTAVVLEEETEEGRKRAGVTAEEMIRRAMHPEQTEGGCDSRCEADTGHGMKEAAQPEGGKRDGVIRKKSDTLAAYSAKVEKIRHYIREGHIFQTVLSQRWTVETGRDGFSLYKELRELNPSPYLYYFQFGDFEVIGSSPEMLVKQQGKRVFTCPIAGTRPRGKTAEEDEALRRELLADEKERAEHVMLVDLARNDMGRISEFGTVKVTDFMNVRNYSHVMHIVSMVEGRKKGSYHPFDLLASFLPAGTLSGAPKIRAMEIIEELEKVRRGLYGGATGYVDFSGDMDFCITIRTMIKKGREVYLQAGAGIVADSVPGKEYQECCNKVMALARTLLEEENLMNNDVFETMPVPKAYFKMALPVVFGMVISLVYNMVDTWFIAKTQNTSLVAGVSLCAPVFSLMIAFGDIFGLGGSSAISRLFGKKDYDTARRISAFCLLGSIFFGIAVAVLMLLFQTPILHLLGARDDTIAYAGAYYRFLVLGCPAIIFNIVPGNLLRTEGLANDAMIGSVIGAVFNIFLDPIFIFSLHMGAGGAALATILSNLLADCYLVWVVFKKAGHLSMSCREMHISSGHVRDILLIGIPASITNLMQSFAVLLTNRFLLPYGSDKVAALGIALKVNMITMLILVGFAFGAQPLLGYCYGADNRERLKQFLHFDLLVQLLIALVFTAAACIFAPPIIRIFMQDDVIVVSGALMLRCLMITAPVIGMILVFTTLFQAAGMALPAFLMSISRQGVLLVLCMLLFSSLFGYMGILLAQAVSDVLTGILGFLLLRRSKILLMEFDEILRGHGQRVPIKEAEIQKYAKKVAALYKEKIALLPDHVKSSMSIGAVVVDIGKHNTARVMFKDNLMMLRKMRGMTQEELAEKIDVSRQTLSKYETGESLPDVEKSRLIAEVLDVTLDELVNYEGGETRLPFSPKGKHAFGMVKVGEKGQIVIPAKARKIFDIKPGDVLMVLGDEERGIALLKEQDFMAMVQAMRHMETQNCAIRCAEDCNMMRRHYLDNIRWITVGLVVLYHVIFMYNGVVTAGVIGPFWEVQYQDAVQYLLYPWFMVLLFLVSGMCARYYLEGHSDREFLAGRTRKLLVPSTIGLFVFWWIQGYFNMAFSHVFDQSWEKVPKAVGYLIMVLSGVGILWYIQVLWVLSVLLVLLRKIEKDRLYAFGEKAALPVLFLLVISVWGAAQILNTPVICVYRFGIYGICFLLGYYVFSHEKVTDRLARVSVPLAAAAVVLAVFYVRYYFGENYAEEPVVNSPFSILYGWTVCLAVLGGMKRWGNRTSQKTEWLSKKSYGLYLFHYLALSAAAYFLDRYTEVTGGAAYLLSGIAAYAGGYLLYELIKRIPVIRWCVIGEKKERKHVQGMQTAGKQKNKKYNVNRIRSGAVALCAALFLLLSGCGAASDGQAVRQQAALSGGALQDGQMSEQQMAEQQENGEASTAGTEGQREEQMPDGTLSVTFLDVGQGNAVLVEQGGAYMLIDGGNRDYSSFVVSYLKEQGVEELAYVIASHYDADHLNGVVGALHAFSCGQVLAPDYVTDTRVYESFERVIKEQDIALAYPAVGDTYTLGDASFTVVCPKAYDPKEDNDNSVGIRLVYGDTSFLICGDAGKAEEQVMLDSGVTLESDVYLASHHGSEGSSSEAFMRAVSPTAVVVSAGAGNSYGHPTRTVLNRVKACGAALYRTDLQGTITVTSDGTSLSWSVDATQDYRDGDEVAAGAADTTGTSGTAGAGVTDAAAGSADTTGTSGTADTADSAAQASVAADTAGSAAQASSGGETAADGTADVTGEYVLNTNTKKFHRPSCSSVAQMSPENKAAFSGSREELIAAGYDPCKRCNPMIKADGHIFVLETAHTTYCFWRMETGHLEHLYYGRHLTLPEHPAERDVAPLMEKHTFAPGNTNLCDGEHPAFSLEDMRLEMSSYGKGDIREPFVEIVHADGSTTSDFRYESYEITEKTAETENGDLPGAYDEKGEAQRLSVRLRDHSYDLVLELHYDVYAECDAIVRSAVLFNESGEMIRLNRLMSIQIDFDPAEYVFTTFTGAWAREMHRSDTRMEAGKHVNASYTGTSSSRANPFVMIAKTDTTEDTGECYGCNLIYSGNHYEAAEVSGYGKMRLTAGINPQSFSWLLAPGENFAAPEAVMAYSCEGYNGMSQCMHAFVREHIVRGAFKHKVRPVLLNSWEVAYFDINERKLLALAKKAKEAGVELFVMDDGWFGERNDDAHSLGDWEVNEKKLPGGLAGLGRKIKALGLDFGIWVEPEMVNVNSHLYQAHPDWTIEIPGKPHAEGRNQRILDLTRTEVQDYIIETMTKVFSSAEISYVKWDMNRTFTDYYSRALPPERQGEVAHRYVLGLYRCMRELTARFPDILFEGCSAGGNRFDLGILSYFPQIWASDDTDALCRAEIQTGYSYGYPMSVVSAHVSACPNHQTLRVTPLETRFAVAAFGICGYECNFCDLSSEDFAAVKAQIALYKQWREVLQKGRFYRGRTFGEGAHESALSQSVGNQMEWTCVSEDQTRAVGMLMQKLVVPNTQYHSYQAKGLKPDARYHFYNRSLKYNIKDFGDLVNTVSPVHIRQDSLALDLIARFKKMDGEIEDCHAAGDMLMYHGVKLKQAFGGTGYNSEVRYFQDFAARMYFMEEEKGHADSGEAEKMKLTGKEKVSYGLGAVGKDMVYMLSASYILYYYQDILGVSAFAMGVILLAARVFDAFNDPIMGVVVAKTRTRWGKFRPWLFIGTILNAIMLYLMFSAPPALDGGGLVAYAAVTYVLWGVTYTMMDIPYWSMIPAFTEGGKEREGLSTMARSCAGVGSAIITIITMLCVYRLGGGDERVGFKWFALIIAILFVLFTTITCVNVKEKSTVNVDSPSVGQMFRALIQNDQAMTVVITIVLINCAVYTTSNLVIYFFKYDFGGEGWYNSYTLFNTFGGAVQILSMMILFPLLRKFMGTIQVFYTGFAMAIIGYVVLLVLAFTNMSNVVLLFIPGFFIFGANGVLTVLTTVFLANTVDYGQLKNHRRDESVIFSMQTFVVKLASGVAALIASICLQICNLSNDTTDTAAVATAAASSVVGLRMTMTILPMICLLCGIFIFHKKYILTEEKVAEIAEQVKKGAYMEEKSKVIFGNPMPDKVYRKAVKSKKKYAKKFGDDAGADYPAIVKKNEYIGDMLGVHDIRVGETGENVGFDTEKGIIVGNIRMGFGHYRISMAIASAAHSMGYVPYWMDLNSYPQTTCTKVIGAQNDLYSLGSRLSQKSRLFNRLVWEPMNYEGFRKLSYNAADQKNAELMAPVYANVPKELPVVATHVWPAQAAIHAGMKHVVNAIPDNWPMALHLSEGSIHTVQTHYAYQGYRILNGMQGADVLRPMPEDDLIYTGHYIDHELVSNIEADCEMRRARKREKKPVRFLLTIGGAGAQREIFASIIKHLLPAIRDGRAALYVNVGDYRNVWEELIGEIPGMKKFATEHFNNWKDTTEFAAQALTSEVSGIHGFWHENIFEAVYCTNLLMRSCDVLVTKPSELAFYPVPKLFIKRVGGHEQWGAIHSAEIGDGTLECRDIPHTVQMLDLFLNEDALLNDMCDCIEKNKAAGIYDGAYRVVELAMEKRMENRVYLNDDWKFSEQFTEEMLGDGFDVGNMTPVRLPHTAKETPLHYFDESVYQMVSGYRRDVFIPEEWKGKRLLLTIDGAAHESEVYWNGKKIGEHHCGYTAFTMDISDDAVYGIRNTLVVKVDSRESVNIPPFGFVIDYMTYGGLYREVWLDIKEKTYLKDVFVRGDLSGDTGRLISEITADGSGENLSVRQKIRRCGESGYRLLGECEMTGTKLVLDYTVESVLSWDTVHPVCYEVCTQLIRDEKVLDENVTVTGFRHAEFKADGFYLNGKKVKLRGLNRHQSYPYVGYAMPESMQRMDADILKYELGVNAVRTSHYPQSHYFIDQCDRIGLLVFMEIPGWQHIGDEAWKDQAVINVRDMVMQYRNHTSIILWGVRINESQDDDDFYRRTNAAARELDPSRPTGGVRAHKKSSLLEDVYTYNDFVHDGTNQGCEKKAAVTSDPKKPYLISEYNGHMYPTKAFDWEEHRAEHALRHVRVLDAAAAEGDIAGSFGWCMFDYNTHKDFGSGDRICYHGVMDMFRNPKLAAKVYECQQEEHTVLELSSSMDIGEHPGCNRGETYIFTNADSVRMYKNDRFIKEYKREDSPWKHLPHGPLVIDDYIGDAIEKGEHFTPAQGKGIKDALNATARYGLSHLPKSVYVTALKMLLLYHMKPTGAVVLYNRYIGDWGGTSTTYRFEAVSDGGVTAELIKKPMTKVVLFARADHTGLQEKSTYDVAAIRIEARDEYGNLLSFFNEPVSFEVSGPVELIGPSVISLEGGMGGTYIKTTGECGEARLVIRNAQTEPVELHFAAAAERQRLMQQKEVILEGTIKAFNEKGLKFTMDDVAKILGMSKKTIYTVFRDKESMFLAMVDYMFDSIKESEQQIVEDDALSTVEKIRRILGVIPESYRDVDFRQLYLLKDKYPVIYKQVEKRLETGWETTIQLLEQGMAEGVVRKVSIPIVKMMLEATVEQFFQRDILIQSGLSYLEALDEVVSILVNGIVVPEAAGMMSSMSVINHIIPIVRRDCKNAQAAERPEFSTFIQKMETDFVNSVSCENLEIVIEMENDHIRTILNNIENGTLTASEAYAQLKLAPFEDLGYAKVDHHREVRQGAPEVIYGASKTKEQIEGITNSLLAHCPENILITRLSPESAAYLSELFTLFYDEASRIGIVNRTPHITAEGTIVVATGGTSDIPVAEEAALTAEVLGNKVVRVYDVGVAGLHRLLSNMELLSSANAIVAVAGMEGALASVIGGLVDCPVIGVPTSVGYGASFHGISALLSMLNSCASGVSVVNIDNGFGAGYLASMINHIGGMKTIYLECNMGAAGDMLMSALYEICDQKEWFLHKMNTVFAPYHIVLSPESAVSCGINGTHMKVTVDGTEEVSLDVKAGHAHHTHAESPDASFAHEASDSAEDGHSHTHTTYAAVCEEIASLDLPAEVKDDALAIYRLLGEAEAKVHDTTLEQIHFHEVGTLDALADVVGCALLIRTIAPEQILASPLHVGNGFVKCAHGVLPVPAPATAELLRGIPFYTGSVTGELLTPTGAAILHYYVLRYLPMPTMTASEIGYGIGSKDFGIANCVRAFLGDTASYLAAEEEEPYSCDDTILSISCNIDDMTGEALGLATEIFMAAGALDVFTIPIQMKKNRPGILLTCLCEMEEREKFTGLFFLHTSTRGVRYQVFERAKLESTFETRKTSYGNIRIKKSSGYGIQKEKAEFEDLKSVVLKNHCALSLNEVEKSLHMKQEELCRKLTEMIAETKAQKLSWRLEVQTTEGNDASEKPIEEEHGTKWTIDECYASYSCNYRGKEFCMITYELLKKSGDKERSSNLVFLPPEGIRFFDLHTLLPYSVEMSAVLADHIHQLWLLLMEQYKEKCPGVELAVRPGMLTIEEENLMAGKNVEGQLELFSLFDSVEELEQKIKGAGLKEVQGEPVMEQCYRHRDTGETAVAAYLDYNRVYVADWGRKPLLYQFDSTKEAVGYYADWLDRHASDEAAVAAQRPEALQKAKAVRWENTEVEKMRLTELLKTDQVTISCELFPPKQGAQLANYKNIVADMAALKPAYMSVTYGATGGTSDYTVELASEVEKHQIPALAHLTCASSTKEKVASVIEELKEKQISNILALRGDIPQNADFPLPNQYRHASELIADIKAQGDFCIGGACYPEGHPEADTIFEDLDHLKEKVDAGCEFLTTQMFFDNHILYNFLYKALSRGIDVPVVAGIMPVTNKAQIKRIVSLSGNMVPPRFLAIVDRFGDNPAAMRQAGIAYATDQIIDLIANGVNHVHIYTMNKPDVAGEILDNLSEIYVRAMYDELTEQDIKKMEEEIEYRKLVVRKEALEAVKEARAQGDLSENFEYHAAKKDKNQNESRIRYLEKMIKTAKIISTDSAEDEVGMNNTVTVYFEEDDEEEVYKIVTTVRGNSLKNLISNESPLGKALLGHRVGDRVEVRVNDDYSYFVTIRKIENTVDDGTDKLRKFMRVLMTNIIALCDEGLYEELLRYVPTERQEKIARCGKRQDRMRSLAAGLLLEYGLRSMGCSLLPLVPETETVHLVCGTHGKPELSGGAGVHFNLSHAGDYAAAVFDEGEVGIDVEQVRRVNVNVMRRQFTAEENAYLLSEPDAFLRLWTRKESYCKAVGEGLHLPLSSFDVLEDQVAGRTAPAAEAAVREADAGQFYLYTEVPVKGYVLSVCAGHPITGCPVENVDLRKLFDGISMEELFDSLKNWGCDVDGALARFIGDRELYRSCLHTAAGDQNFELLPEALRAGEMGRAFECAHTLKGMLANMGLIPLYDIVVRIVEPLRAGEPAELLPVCDELLAARDRLNTLLKESAMGSRDKVLIVDDSELDRIALKKMLKDAYEIVEAVDGAGALRILESQKEFDAISAIILDLVMPQMDGFEFLREYRKVDSYRRIPVIVASVERDVKTEKACLALGARDFIGKPYDPQIVRFRVENAVRSSEQQLSRELRYRADYDMLTGIYNKTHFFEATRVLLKRHPEETYAFLRLDIEKFQLVNSFFGSSSGNGLLQYIAKEIRKFAGDTEQIAYGRIEADIFGICMPYRGEEAMLELVRYMRMRLGQYQLAFDVVPAIGIYVIRERDLSIDAMYDRANLAAKQCKGNYIENYAFYVDEMREDIVREQQIVNHMRHALDEEEFVLYLQPKYSLQDNRICGAEVLVRWAKPEGGMISPGEFIPIFERNGFIAKLDYYVWEKTCKLLAGWIAEGKKPSPVSVNISRVSLYNPRLVEAICGLTDRYHIPRELLELELTESAYTTNPKAIKETMERLQKEGFSILMDDFGSGYSSLNVLKDIAVDVLKIDMKFLSDTDQEGRSQNILASVVRMAKWLNLPVIAEGVERREQVDFLHSVGCEYVQGFYFARPMPVSDYEKLVSEKKDELQEKYQKDEIGRDMLWNATSQMGSVFSGMMEPAVIYEYEKEQNRIDTLRVNNAYYDMFGYEDINSSGGLVMEKQLSDESRKILIDTFEDIAKSKETAACEFLRTSKSGRSIWVHLKLKYITSVGEKHIIVGTLTDITEQRMMDQELQKYRQVLLAAEKTERTMLVVDDQEVNRGLLKCIFEQQYRILEAENGADAFEVLNRESGKVDIILLDLAMPVMDGMEFLKRKQQDAVLAGIPVIIITADDTTGHQIQMLQLGAEDYIVKPFVPEIAMRRVENVLGAGRLLKRMSVAGGKDKGETDNGGTVMEQKNDFLGRDPIGRLLWRMSLPAIVAQLINLLYNLVDRVYIGHMPEDGALALTGVGVCLPIIMIVSAFAALVSNGGAPRASMAMGKGDYDEAEKILGNSVALQIVISAVLTVLLLLFYRPLLLTFGASENTIGFASDYMKIYAAGTVFVQLTLGMNAFITAQGFAKTGMLSVMIGAGCNIVLDPVLIYGFGMGVRGAATATVISQAVSTVWVLSFLMGKKTVLKIRKKYLRMEAGVVLPGLALGLAPFIMQASESVITVCFNASLLKYGGDVAVGAMTILSSAMQFSMLPMQGLGQGAQPITSYNYGARNADRVKKTFRLLLTTSLCYSMAVWLLIMLFPQVFAMIFSSNAELIAYTKWALRIYCAAMGIFGAQIACQMTFISIGNAGASIIVAVMRKFVLLLPLIYLLPHLVKNQTMGVYLAEPAADVIAVSFTLVLFFFQFKKAIAAIEKPQMNVQYAKEVIELPAGSGGKAETLLMRLIRAGHYVDAPCGGKGTCGRCRVRFVSEAPQPTANERRLLTEEERSSGVRLACEVRVAEACSLQLPVSREQEIDVLVTADAADGAIPSRTVDEGIPGQTAGTIHGQRDCVAMHSREDAAKIWGHSGKKRCGAAVDIGTTTLAATLYDLTDRKRIAAASSVNHQRAYGADVLSRIQAANEGAAEKLRLSISRDIDALLAGLVADAGIPDDAVEELVIVGNTTMCHLLRGLSCAGLGAAPFTPEDLSLWEGSGAELALSDQWSVSVTILPGISAFVGADIVAGIYALEMDREKNVLLLDIGTNGEMAAGGADGFLVTSAAAGPVFEGGNISCGVAGVPGAVTNLVLERDPAATGGIRTVELSTIAGETPIGLCGTGIIDAVGEAVRLGLIDENGTFEEPWFTDGMPVAEGRFRFRQEDVRQVQMGKAAIRAGIETLLAEYGGGDPEEILIAGGFGCRMDEEQAIRIGLFPEQFRGHITMIGNSALAGAQRYLLDDRTAAKQRLASITGHAQELSLAMHPKFNELYLDKMFFDTDRMAVWNPWHGCKKISAGCDICYVYEKDAMYGKNASVIRRTANFDLPVKKNRRGEYKLLPQEEPVYVCMTSDFFLPEADEWRSEAWAMIKERQDLSFVIETKREHRFFKALPGDWGDGYENVTILCSVEIQRRADDRIPAFLKLPVRHKGILCEPLLEKLVLDAYLKTGEIAQVLCGGEQGADARVCDFAWVLELMNQCVNCGVTFRFLRTGTFFRKGNRIYRIAEEEQEEQARRAGVDYTPMKLISWNVNGLRACMQKGFAEFFTASDADIFCIQESKLQEGQIDFAPEGYYAYWNYAQKKGYSGTAIFTRKEPLSVHYGIGIPQHDTEGRVITLEFPDFYMVTCYTPNSQNELARLSYRMEWEDAFLSYLKGLDQNKPLILCGDLNVAHEEIDLKNPKTNRKNAGFTDEERAKMTVLLSAGFTDTFRHFYPDTEGIYSWWSYRFHAREKNAGWRIDYFITSSALDDRLVDAGILTDVTGSDHCPVTLTVDLPFCPMQSLETLTERDFDSVWEIMEESFPRDERRSREAQRKILDVSWYHLYGYRAHGELMAFLAVWEFDTFLFVEHFAVRKSCRNGGLGAVLLTQLTAQCRRPVILEVELPTGELEARRIAFYERNGFVMNPFEYMQPAMGEDRHAIPLRIMSYPKRLVADEFETMRDVLYCHVYRQKMKKEDREIFLKQIFWEVVGSAFIAGGIYNFAVQAGFPMTGFSGISIILYQLFGVPIGFSTILLNIPVAILCYRLLGRHFFFSSLRCMLISSLMIDYVAPLFPVYSGDRLLAALCTGVFAGLGYAVIYMQNSSTGGSDFIIMAVKNLKPYWSVGKISFVTDVIIILLGGFLLRDVDGIIYGMIVSFLLAIVVDKLMYGINSGKMTLVVTEHGKEICDVIDSCCGRGSTILQGQGGYRCDNKQIVMCVCNNKEMYLLQHAIKEADPASFMIILESNEVHGEGFRTIRIGEGETQAKNSAVMKYSYMKYMYARPFHIYIAYVKYYFIPLKGAFTYEYRYMNTGIEITMKLSAAYSAVCRPLCHELNLPQTAFDILMFLANNPEYTTARDIVEVRKIKANLVSINVDKLVGEDYLRREADTDDRRKTHLLCTDKAGAVIEQGRTLQNRFMNSLLAHIDDAARKQLAESIHQMEQNLDHMLEEEHMTLLFTILVTFFAGMGAGLGTGFAGMSAAAVISPMLITFLDVDPYMAVGIALSSDVLASAVSAYVYGKNKNLDIRNGVIMMVSVLIFTVIGSYISSLVPSTTMGNFSVFMTFLLGIKFIVKPVMTTKESMAQVSAKKRAVQSVVCGVIIGFICGFIGAGGGMMMLLILTSVLGYELKTAVGTSVFIMTFTALTGAVSHFAIGGAPDWTIFLLCVVFTFLWARIASVFANKATPKTLNRATGVILVVLGIVVLAFSLLMAKRIITISREFGSGGRFIGEEVAKKLGIAYYDKDIIGQIAEKSGFSTEYIKENAELSPKKGLFGYAFAGRDLTGKSVEDMVYEAQRKVILEIAEKESCVIIGRNADFILKDREDVLNVFIHGDMPEKVQRICRLYHVTEAEAVKMMADIDKRRMTNYRFYTEQKWGMAGNYTLSMNSSRLGYEMCEKMIMDCTKAGVAHSCICTSQVLMTESNKMKEMPVKKLMVQMGIPMILSMALQAVYNIVDSAFVGNMKVGSEAALNALTLVFPVQMLMVAVGIGTGVGTNALLARTLGQGNTKKAAKVAGNSLFLGGIIYAVCLLFGIAGVKAYISSQTVDPEVISMGTSYLRICCVISFGIIFFSLFEKLLQATGRSLYSTIGQVVGAVVNIILDPVMIYGIGPVPEMGVEGAAYATVIGQVASAVLLFMFHMKLNQEFEHGVEYMKPDAGIIREIYAIGLPAIIAQALMSIMVYVMNLILKFSPSAQTAYGLFYKVQQFVLFLAFGLRDAITPIIAFAYGMGSKKRIKDGIKYGLLYTTALMIFGIIITEVFPGAFATLFNAGQSREYFIGAMRIISISFIFAGINVAYQGIYQALDGGIESLVISLLRQLVIILPLAGIFSIFARNGQMGISLIWWAFPITEMIACLVGYVFLKGIRKNKVERLSMANKWVYMFSEGDMTMRNLLGGKGANLAEMTSIGLPVPQGFTITTEACTQYYEDGRKINDEIMAQAMEGVKKMEEINGKKFGDLKNPLLVSVRSGARASMPGMMDTILNLGLNDDVVAAMIAGNPDPAFERFVYDSYRRFIQMFSDVVMEVGKKYFEQLIDKMKEEKGVQYDIDLTAADLKTLAEQFKAEYKNQLGTDFPSDPVEQLKLAIEAVFRSWDNPRANVYRRDNDIPYSWGTAVNVMPMVFGNLNNESGTGVAFTRDPATGENKLMGEFLINAQGEDVVAGVRTPMPIAQMEQEFPEAYAEFLKVCETLENHYHDMQDMEFTVENKKLYMLQCRNGKRTAPAALKIACDLVDEGHKTEEEAVLMIDPRNLDTLLHPQFDAAALKAATPMGKGLGASPGAACGKIVFTAEDAEAWNARGEKVVLVRLETSPEDITGMKASQGILTVRGGMTSHAAVVARGMGTCCVSGCGDIAMDEENKKFTLAGKEFHEGDWISIDGTTGNIYDGEIKTVDATIAGEFGRVMAWADKYRTLKVRTNADTPADAKKARELGAEGIGLCRTEHMFFEEDRIAAFREMICSDTVEEREAALDKILPYQQGDFEKLYEALEGCPVTIRFLDPPLHEFVPTEEADIEKLAKAQGKSVETIKNIIASLHEFNPMMGHRGCRLAVTYPEIAKMQTKAVIRAAINVQKAHPDWTVKPEIMIPLVCEVKELKYVKKVVVDTADAEIAAAGVKLEYEVGTMIEIPRAALTADEIATEADFFCFGTNDLTQMTFGFSRDDAGKFLNAYYDTKIFENDPFAKLDQTGVGKLMDMAIKLGKPVNPKLHVGICGEHGGDPSSVEFCHKIGLDYVSCSPFRVPIARLAAAQAAIANKMSPMKKIFTTVAAMVLALAMSVTAFAAPSVTNNTTLPTETVGSVTYIRNYSAVTATATDANGNAVNLAVRQLTAGEAAAARAAVAAKFGSNVDIMGAGDYHADGASESSPVTVTFNASVNAGDSVCIFHKHADGNWYVEDATAANGTVTAKFTSFSNMVIVRTATASNGNTTTPGSTDGSNDQYVATSSNTAAGTSPKTADNGVAGMAMIVLACAGALVVVNRKKIAMRARDNGNKPDGNVNKRWFRWGIIVLGVLALAAVAGVAGGYYYGLHSLKLQAVQGSDSGYSNDERTLDDKISYQGKTYVRNRDIYTVLCMGLDTENDMSEAGGASGSGAQSDANFLAIIDKKQKKIRLVAIPRDTMTDLETFYMTGEPLGLLRDHLALQYAFGNGGIESCKLMERAVSRLFYDFPVDAYVAFSLNSIENLNGMVGGVTVEIQQDFDDFKAGDTVTLNNEQAYHFIRWRDCEEAYSAQYRLQRQKQYLVAFIEKAMTATKQDMRTPFRMYNSISDSMLMDLSKAQMMSLVMLGLNCDFTEEDLLVIPGEQVQGQYYEEFHIDEQAFYELMLELFYTAEDAMIIKVALVVVLISCLIYMISHFIRERMAQKQYEEIQQESVVIPTENTESPMEIDAEIYDTVPEVDFDTLWETNTDICAWLYIPDSEVNYPILRKQDAENQYDDYYLQHTVSGQSGLPASIYIQPCNRADFTDYNVVVYGHHMKNGTMFGSLHQYLDAAYMKEHQYVYVVTPEEELIYQVFAAVEYDDRHILQSFSFTEAYGREAYLDSLRKNDGDNDYFREDVEATENDRLLTLSTCIKNESEKRLLVEAVLVNESERMEKIKKLWNAVSYEVVIAAGLTVWFLTGRALDLQGWSSAWNAMDYSMGTGSRLLIGSIYRLFYGEYLDYTVAYKYVAVGTMLTILVLAIVLGRMIRLAVAKNDQIRHAVLGAVALYLVAPFSIAYVWNDQNLGRLDVYMLLVALLALLVGLAIKNTYVKCVCYTLLGVVGLAIHQGFAFLYYPIVFSVMVYDVFEENRVHAGRFAAAFVSGLINVAVAVYFQFFSSINFDSAKELVTFLEGRTNLTISEYALDIEYFLKMDYQLKEITPQFYKYDAPIRHALLVLLLLLPVLVWCFQIYRDVFGWQKKSNVKWYASPYFYMLLSQLCFVPMFVIHTDWGRHFAPLFAMQIFMFLFYAAKGEPAMVYACENMCGRMKKHPWIFVVSILWIAKLDSFGARDFLKQATYLFDFLQRGFFINMEKSMDKIVALAKSRGFVYPGSEIYGGLANTWDYGNLGVELKNNVKRAWWQKFIQENPYNVGVDCAILMNPQTWVASGHLGGFSDPLMDCKECHERFRADKIIEDYAEEKGITLQSSVDGWTQEEMKNFIEENQVPCPSCGKHNFTDIRQFNLMFKTFQGVTEDAKNTVYLRPETAQGIFVNFKNVQRTSRKKIPFGIGQVGKSFRNEITPGNFTFRTREFEQMELEFFCEPGTDLEWFQYWRGFCRDWLISLGIKEDEMRLRDHDPAELAFYSKGTTDIEFLFPFGWGELWGIADRTDYDLGRHQETSGQDLTYFDDEKNERYLPYVIEPSLGADRVVLAFLCAAYDEENIGTEEKPDMRTVLHFHPALAPVKIGVLPLSKKLNEGAEKIFAQLSKKYNCEFDDRGNIGKRYRRQDEIGTPFCVTYDFESENDGAVTVRDRDTMEQERIKIEELDAYFAQKFAWMKRLVCTVCSVLLCVGLLSGCGTSLEGEESVVYVGKKGVIESLDVESLDQSYYDETELKSYVDAEVEDYTAEHGKNAVEVESLKVEDGVAKLKMKYKTPEDYTAFNGIELYQGKVVASLAAGYVYDGEFARVEEGKVVGAATKQDIYSEDDLKVAIIRANTDVKVDGEICYVSCQNVKLTGKDSVSIRDGYYLETGSVTASVDVTGQESVGTEQLSGTEQMEMTGEPVNADDTEQTEASAGDGSFETDVYTFIVYKMPIGEYDKRITLLTKERGKITAFARGARRPNSQLLAAANPFCFGEFELFEGRSAYTLARATIQNYFRELTGDFDATYYGFYFLEFADYYCQENNDEREMLKLLYQSLRALASSAYDNRLVRVVFELKALAVNGEAPNVFSCLSCGSREHLTWFSVKRGGILCAECRNEAPDAVELNESTVYTMQYVILARIEKLYTFSVSGQVLEELTRLLRSYFGVYVGHAFKSLKILEDAEKVEIMFLKMAEPSENLILEAGSVKETEDMPMEEAWRDFLVSGRVTDYLRYRNAVDVQESSNILAGEEQPDGKQYCGDRDGLTGNADWRIMKDNFKSGFVTIIGRPNVGKSTLMNHLIGQKIAITSNKPQTTRNRIQTVYTDMERGQIVFLDTPGIHQAKNKLGEYMVNVAEHTLSEVDVILWLVEPSTFIGAGEQHIIKQLKKTKTPVILIINKVDTVEREKILEYIDAYRKVFDFAEIVPASALREQNLDTVVDVIFKYLPYGPMFYDEETVTDQPERAIVAEIIREKALHALDDEIPHGIAVYIDRMKERRGQNIIDIDATIVCERDSHKGIIIGKGGSMLKKIGSNARYEMERLLDTQVNLKLWVKVRKDWRDSELMMKNFGYNKDDIMTGQERNYGFMKLSELTAYELLGEQELKDIHSMGYILRHKKSGARITVISNDDENKVFYIGFRTPPEDSTGVPHIIEHTVLCGSDKYPVKDPFVELVKGSLNTFLNAITYPEKTIYPVASCNNADFQNLMSVYMDAVFHPDIYKHREIFEQEGWHYELEDEDAPVTINGVVYNEMKGAFSSPDDVLERLILNSLFPDTSYANESGGDPEHIPELTYEQYLDFHRKYYHPCNSYIYLYGDMDVVEKLRWMDEEYLGKYEQIELDSAIRMQKPFAAPVEIVKPYPVASGETLTDNSYLSYNVVVGTVLDKKLYQAFDVLDYALLSAPGAPLKQALIDAGIGMDIGGGYDNSTLQPVFSVIAKNANPEQKEQFLQVIRETLQAQVADGIDQNALLAGINSSEFRFREADFGQFPKGLLYGIQCLDSWLFDDMQPFMHLEALDTYQFLKDQIGTGYYEELVKTYLLDNPHASVVITVPEQGLGAKRDAALEKKLAEYKAGLSREERKKLIADTKHLKQYQEEPSPKEDLEKIPRLTRADLKKEAAPLLNREIETEGVSIVAHEMDTNGIDYLTYLFDVCDILPEDLPYLGILKAVLGYVDTDNHSYAALANEINMYTGGIGSSIGIYPNVKKQGEIGLYYEVRTKVLASRLPDAMRLIKEILLTSHLSDEKRLYEILAQLKSRLQAGLSASGHSVAYTRALSYFSAAAYCQDATAGIACYRVIADYEEHFEEKKQQLMEKLFSLVKTIFIAERMLVSATCEESEIPAVTQASAALKNVLYVPDQPGKNRSMPSYPLAKKNEGFMDASQVQYVARAGNYAAHGFSYHGALRILKVILGYDYLWINVRVKGGAYGCMNGYMRNGDTYFVSYRDPNLSATNEIYDGIPAYLEKFDADEREMTGYIIGTISDMDTPMNPSAKGARSMTAYLQELDYETLSKERSQIIGAQPADIRALKPLIASVLSDGSLCVIGNEDVLTSEKQMFETLESLTMQQGTVKWFNAKKGYGFISDAEGNDVFVHFSALNMDGFKELKDGEKVEFEVTEGAKGPQAANVTRIAMNGIAALLEQGRYLAAQTDAFPSTTETVEALNHAQEGIEEVAKNPGIIRTWLEGLVPDLLNFAFQVLIALLVYVIGGKIIKWITKLVRRSMDRAGTDEGVKQFMIPVIKYSLYVVLIFIIMGLFGIATTSAVAVLGSAGVAVGLALQGSLSNFAGGVLILLLKPFKVGDYIIEHSHNNEGTVTEISIFYTKLLTVDNKLIVIPNGTLSNSSLTNVTNKDRRRVDLVVGIAYEADIRTAKDVIYAVAEKEEARIPEEKPVVYVDNLAASSVDIGLRVWVKTEDYWPARWRMTENIKYALDAKGISIPYQQIDVQIKQMAEIRPFVSIRPQRGKAAEIAALPYDVYNREEATKEVERHPQSFLSIDRAETQFPLSVDMYDDKVYERAHDTLWQWVEDGTFLTEDKKCYYLYELTMNGRVQTGVAACASIDDYENGVIKKHENTRAEKEVDRIRHVDVCNAQTGPIFLAYRANDGIRRIVEKTKRGEPEYDFTSEDGVRHRVFVIREDADIAAIHEAFAGIDSIYIADGHHRAASAVKVGQKRRKEHPGYTGEEEFNYFLSVLFPDDELMIMDYNRVVRDLNGYSFKGLYREVEKRFDVEEITGAEDTRPKERGTFCMYMEGHWFSCHIRQEDRTPEDPVADLDVSILQNKLLEPVLGIRDPKTDGRIDFVGGIRGMDELVRRCEQDCAVAFAMYPTSIAELFAVADAGLLMPPKSTWFEPKLRSGLFIHEIMHKYHCLNPIAAVGLDLFSDDYQKVEDLKDAEAVLVRSAAMHDLELPEGLAAVARAGAGVNNIPLDKCAEKGIVVFNTPGANANGVKELVFAGMLYASRDIVGGIDWCLANQNDENIAKTAEKQKKNFAGTEISGKKLGVIGLGAIGVLVANAATHMGMEVYGYDPYISVSAAWSLSRSVKHISNVEDIYRECDYITIHVPLLDSTRKMIGADAIAMMKPTAIVLNFARDLLVDEEAMVDALAAGKIKKYVSDFPNTTTVGAKGCIVTPHLGASTAESEDNCALMAVREIRDYLENGNIVHSVNFPDCSMGACMTAGRIGILHKNESGMLSHFTTILGNAGINIDGMANKSRGDYAYALIDVDTNVPDDVLAKLEQTDGVLKVRKVKMSRVYNFSAGPAVLPEEVLKEAADEMLDYRGSGMSVMEMSHRSKVYDNIIKEAEQDLRDLMNIPDNYKVLFLQGGASQQFAMIPMNLMKNRKAGYIVTGQWAKKAYQEAQIYGEAVKLASSEDKTFSYIPDCSDLDIPEDLDYVYICENNTIYGTKYKKLPNTKGHTLVADVSSCFLSEPVDVTKYGVIYGGVQKNVGPAGVVIVIIREDLITEDTLPGTPTMLKYKTHADADSLYNTPPCYGIYICGKVFKWLKKMGGLSVMKERNEEKAKILYDFLDQSKLFHGTVVPEDRSLMNVPFVTGNEELDAKFVKEATAAGFVNLKGHRTVGGMRASIYNAMPKEGVEKLVAFMKKFEEENANAMELTGAQIVIECLKEQGVDTVFGYPGGAILNVYDELYKHQEIRHILTSHEQGASHAADGYARSTGKVGVCFATSGPGATNLVTGIATAYMDSVPIVAITCNVNVPLLGKDSFQEIDIAGITTPITKHNFIVKDVTKLAVTIRRAFRIAQKGRPGPVLVDIPKDITAAKTEYEFCKAEPIARVTDTIREEDLAKALAMIKAAEKPYIFVGGGAVISGASAELKEFVHKVDAPVCDSLMGKGAFDGTNDLYTGMLGMHGTKTSNLGVSECDLLIAVGVRFSDRVLGNAKKFAKQAKILQFDVDAAEINKNIRVDAAVIGDLKEILKRINAELPQLGHEAWIAHILDYKVKYPLTYQEPGLTGPYLVEEIYRQTDGDAIIVTEVGQHQMWAAQYYKYKNPRTFLSSGGLGTMGYGLGAAIGAQVANPGKQVINIAGDGCFRMNMNEIATAVRQKLPLIEVIVNNHVLGMVRQWQDLFYEKRYSATVLDDGVDYVKLAEAMGATGYRATTREAFNEALKAALAAKTPVVIDCVIGCDDKVWPMVAPGADISTAFTGEDLVAVQSMKSDNVKKGMQQAPHRSLFNALGFTEEEMNKPMVGIVSSYNEIVPGHMNLDKIVNAVKLGVAEAGGVPVVFPAIAVCDGIAMGHIGMKYSLVTRDLIADSTECMALAHQFDALVMVPNCDKNVPGLLMAAARINVPTVFVSGGPMLAGHVQGKKRSLSSMFEAVGSYAAGTMTEEEVKEYEEKVCPTCGSCSGMYTANSMNCLTEALGMGLRGNGTIPAVYSERIKLAKHAGMAVMEMYRKNIRPRDIMTKEAILNALTVDMALGCSTNSMLHLPAIAHEVGFDFDIAFANPISEKTPNLCHLAPAGPTYMEDLNEAGGVYAVMKELADIGLLHTECMTVTGKTVGENIADAVNKNPEVIRPVDHPYSKTGGLAVLKGNLAPDGSVVKRSAVCDEMMVHEGPARVFDCEEDAIAAIKGGKIVAGDVVVIRYEGPKGGPGMREMLNPTSAIAGMGLGSSVALITDGRFSGASRGASIGHVSPEAAVGGPIALVEEGDLIRINIPELKLELAVPDEELSARKAKWQPREPKVTTGYLKRYASLVTSGNRGAILALPEEQMEYKVGVISGDGIGPEIVTEAKKVLDQLGKIYGHVFRYEEILMGGCSIDATGEPLTDAAIASAKASDAVLMGSIGGNTSTSPWYQLPPEKRPEAGLLKLRKALNLFANLRPAYLYEELKAACPLRDDIIGDGFDMMIMRELTGGLYFGARKTEEVDGVLTATDTLTYNENEIRRIAKRGFDIAMKRRKKVTSVDKANVLDSSRLWRKIVEEVAQDYPEVTYEHMLVDNCAMQLVKDPKQFDVILTENMFGDILSDEASMVTGSIGMLSSASLNDTKFGLYEPSGGSAPDIAGKGIANPIATILSAAMMLRYSFDLDREADAVEQAVKQVLKDGYRTIDIMPQEKQQEKATQVGTAQMGDLICERIRMEKLQARKKVYLWLLILLSLCALIPLAVLSKYNHQSGDDYGYAYRTFQIWRETHSFWNVIKEAFATSAEFYQKWQGLYASAVLLALEPGIFGDKYYALTGILLLAIIVGANCAGTVYIFHRKCGCPRLEGFAAGCVMSFLMIEWMPSALQGLYWYNGAMNYVFFHAVLLLLLCVLLSLAGEHPRRKAGRTVLAVLLAVLLAGGNHVTAFVGILLIVGFGIFAAVKKRRQNLICCVITLAAMVAGFLFNVTSPGTRIRQSYFSDRPGVAGTIVTAVKTGIACINSWMGLAVIVTAVLLLPVLLPLVKKIRGQYGFSFRYPLLVFVLSVAWLCAMFCPPIYAMGTPGDVRLTNVVYFSFVWLFVLNEAYLCGWAVTRLEASGAAALSGAAGEFPGSFLITAAVLAVGMIIGCGENMTAWQAYLLIRSGEAQEYSAEADERYAVLCDSAGEDVVLKAYTAKPWMLFLDDITEEKSDWRNEYMRVYFGLNSVVLEQTEMKSKKNTFVSRAAVGCVTTAIFLLLCIIKGIYPFGIATLDTVDFQSQWIPAYYHVWDVLHGDGSAFFDWRVGGGNNFAGVSAQFSLFSPFNLFFLFVKRSWIEKSMIVFIIIKLLAMGYGMRWFLKEQILKEERYGIYILAGSVGYAVNGYTLLYYGMGWLDVAAILPLLCYFFCRMAEREGDWRLGKNTLGYIVCLTLVFLINIPQAYMMCFFLIVFAGGYFFLNRQDQPLKKNSILKFGLTSLLSLGIAAVIFLPAARAMLGSYRLSGEEYRGISGYFLLLRQDGMDAVWKWVILGSVAVPLLFFVISGRRKREHIWQWYLVAAMVLPVFFEAVNLIWHRGTYVCFPMRYGYMLVFAVICMAAARVPDFVGESRTRRNILYAFLGIWCVQMVALGISLIQPETHTDETDFVGDAMEIGQPLAGKTDVFHKAKLADGAIDNNYPLIAESTSYSNYLHLMTSEQIRMNTLLGYSQVWTRLSDTGGTLASDIMLGYRYYVASKAGLWGKDTAADSLWPLAETKKFTLWENGSVGDRAFFITKADYEAYAATEAYTENVFENQNRLSELLFHTVPIDWEKETYLDDQTGAELSYRFYADGKQILYLYGKDLQQAEITVNGERLYVPDYNDLYNESYPATGNQGILSLGCFSDEDITVEIRQSVGDSGAERAVFFGFLDPQELLEAVDAAGRAVTYELDRDSCKLTVESAGAEYLMLPVNADSGWHCTVNGEERAISRLAGNLMLVPLDEGTNEITLCYVPRGMKKGAAVTGMALMLLAGWGVLSRLLRRKSVLDKIYAGLGCAAADIFAVVYAGFLLVVYVIPVVYTIYLRWIMFSILATESASSAGWISMVVWLVILFAFMYFFMVRPQKKEQQKKNSMLAELAVGDTILTTSGFYGTVIDIADDTVIVEFGSNKNCRIPMQKAAISAVEKPEDVTEMYELLKQEGRAKRGVFHTVHGDIQTPVFMNVGTVAAIKGAVSTEDLEQIKCQVELSNTYHLHVRTGDKLIKEVGGLHKFMSWNRPILTDSGGFQVFSLAGLRKIKEEGVYFHSHIDGAKIFMGPEESMQIQSNLGSTIAMAFDECPPALAERKYVEDSVARTTRWLERCKNEMQRLNGLEDTVNRHQMLFGINQGAIYTDIRIDHAKRISELDLDGYAVGGLAVGETHEEMYHVLDETVPYLPVNKPTYLMGVGTPANILEGVERGIDFFDCVYPSRNGRHGHVYTNQGKINLFNQKYEKDMRPIEEGCGCPTCRRYSRAYIRHLLKAKEMLGMRLCVLHNLYFYNTMMEEIRDALDAGNFASYKEEKLYSMGQINREKEMEKMIEKYLVKKITEPVDWKVTVPGSKSMTNRALLMAVLSAGTVRVEGVLFSDDSRHFLACLVSLGFAVQIEEEKKCVTVTGCGGRIPSREAVIDVGSAGTAARFLAAMLGFSDGCYEIRCSAQMKRRPMAELFELLSGAGAKITFLEEEGHLPVRIAGCRSARADETAGETPRRLSLDITKSTQFLSALLLIAPMVPEGMKIHITSEKTDGSYIRITRKMMQEFGVSVTFDGRDYEVPAEASYRKETYTVEPDMSAACYFYAAAAVTGGRALVRHVHMDNTQGDLRFLEVLERMGCNADDTPEGVRVTGPADGALRGITVNMNDFSDQALTLAAIAPFADAPVRIEGIGHIRGQECDRIHAIQTNLTALGIRCEEEETAATIYPGSPHGGSVETYDDHRVAMAFSLVGLRTDGIVIENPACCRKTFENYFTVLSELTGKKMEAMAGSTLGTLFKITTWGESHGKGVGVVIDGCPAGLSLCEADIQKFLDRRKPGQSRYATPRKEDDGVEILSGVFEGKTTGTPISLVVFNHNQQSRDYSEIASYYRPGHADYTFDQKYGFRDYRGGGRSSGRETIGRVAAGAVAVKILNELGITFMTYTKSIGPIAVSSGHFDFSEVTKNPLYMPDAEAAENAENYLDACMAELNSSGGIVECIIKGMPAGIGDPVFEKLNANLAKAVMSIGAVKGFEIGDGFGVAKATGKNNNDAFVLGEDGRIAKATNHAGGILGGMSDGSDIILRAAIKPTPSIAATQRTVNQSGEEISVNIKGRHDPIIVPRAVVVVESMAAITIVDSLFSNMSARMDALKDFYSMNWLNKLERKFGNWAVPNLIVWLIGAYTIGFVLYQVNPSIIGLLMLSPYHILHGQIWRLITWVFMPTDTNLVYLLIMALFYYQLGTTLERTWGTFRFNVYIFGGMLFTVIGAFLLYGIMYLMNGGVTTEMLLIGTSFSTSYINMSIFLAFACMYPDMQVLLMFIIPIKMKWMAAVYGVLIALSFFETGWAGRMAIFMSLLNFIIFFFSTRNLKRYTPHEVHRRQKFKADMRRPQGYAGGAKHKCAVCGRTELDDPTLEFRFCSKCEGNYEYCQDHLFTHQHIRMSMENNTLHKLGIDIGSTTVKVAILDQEDHLLFSDYERHFANIQETLSSLLQKAYDALGDFSVAPMITGSGGLTLAKHLGVPFVQEVIAVSTALQHYAPQTDVAIELGGEDAKIIYFEGGNVEQRMNGICAGGTGSFIDQMASLIQTDATGLNEYAKNYKAIYPIAARCGVFAKTDIQPLINEGATREDLSASIFQAVVNQTISGLACGKPIRGHVAFLGGPLHFLSELKAAFIRTLNLDDEHAITPENSHLFAAIGSALNYKPGETTTLVSLRDRLANGIKMEFEVARMDPLFASQEEYDAFRARHDGHNVRSADLSTYEGNCYLGIDAGSTTTKIALVGEDGSLLYSFYSNNNGSPLATAIRSIKEIYTLLPPKAKIVHSCSTGYGEALLKAALMLDDGEVETVAHFYAAAFFDPEVDCILDIGGQDMKCIKIKNQTVDSVQLNEACSSGCGSFIETFAKSLNYSVQDFAKEALFAKNPIDLGTRCTVFMNSKVKQAQKEGASVADISAGLAYSVIKNALFKVIKLSDASQLGKNIVVQGGTFYNDAVLRSFEKIAGVECVRPDIAGIMGAFGAALIARERHEAGYQTSMLSIEQINALTFDTKLARCQGCTNHCLLTINRFSGNRQYITGNRCERGLGKEKNKDNIPNLYEYKNKRLFDYTPLSAEEAARGTVGIPRVLNMYENYPFWATFFKKLGFSVVLSPQSTRKIYELGIDSIPSESECYPAKLAHGHVTWLIHQNVDFIFYPCIPYERNEFPDSNNHYNCPIVTSYAENIKNNVDEITSGQVKFLNPFMSFASEETLSSQLIKTFGQSEFGIPESEIRDAVAEGWKELAVCRMEMQKKGEEVLQYLKETGRRGIVLAGRPYHVDPEINHGIPELITSYGIAVLTEDSISHLQPVERPLIVMDQWMYHSRLYAAANYVKTRDDLDLIQLNSFGCGLDAVTTDAVNDILTKSGKIYTCLKIDEVNNLGAARIRIRSLISAIRVREKKQTKRTIVPANYNRVVFTEEMRKNYTILCPQMSPIHFELLEPAFQTAGYNLVVPDVDSRTCVDVGLKYVNNDACYPSLIVVGQLMAAVMSGGYDMSRTAVLISQTGGGCRASNYIGFIRRALEKAGYPDVPVISINLSGLEKNPGFKLTLPLIQHGLYALEFGDIFMRCVYATRPYEAVAGSTDELHEKWKKEVIAFITQKKMLSHGKFKKMCREIIRDFDNLPRKDIKKPRVGVVGEILVKFHPAANNHLVELLESEGAEAVVPDLTDFLLYCFYNTGFKADNLGMSQKSKKIGRLGINFFEWLRSAARDEFTKSRHFTAPAHIDDLARYARDIVSEGNQTGEGWFLTGEMLELIHTGTPNIVCTQPFACLPNHVVGKGVIKELRHRYPGSNIVAIDYDPGASEVNQLNRIKLMLSTANKNLARQTASEQKDQAAGMIKCLCVGLGGAAGAMLRYLIGLVPVGASNGFPVKTLLINILGAFVIGVLAVLGEKHSLPPLLVLTLKTGVCGGFTTFSTFALETSQLFQNGSYGLGIGYVCASVILSIVAVQLACLWLSMKKQHNELIKILAEDKEWQTAKTLAMKLNVSERSVKNYIAEINQLLHDPIESSKRGYRMQMEDIKAFVRQDEAAIPQSPGERQVYLMEWIITCAIREEEIDLFDVSEKLCVSIETTKKDLAVVKKSFETYGLELQTHGNAVGIYGTERKKRKAFRELIYQLFRENELEMSSIQKMIPQIDIVHLRGILMEESEKNSCYLNEYALMDILLDIAISMARIQNHCVLEEKNEVTAEYREDRYRLFTSILERIENDYAIHLDEVEENELKLMIMSLICRRRPAEQTENPKEFLDERTYLLFVRILEYLKDEFDLDDLMEDETFCYKFAGHLKNLLMRLRSGYSAKNMLTESIRESCPLTFECAIGIADIIEQEYGLQMDMSETAYLALHIGDRLESRLEEKEKISCLVIFPQYYHVANRLLEKIEKEFKDELLISFAYETLPEEKPEAELIISTVPIRGADKEQFVLISPFCNQKDILAIKERVQKIKGLRSNRKLQGRLKHVLNQKYFVKNPTFGSAEEAITYMTKRLIEDGMAAEDFTEKVLDREKQASTAFGKIALPHSLKMMGKSTGIFVIISEKPIPWHTQYVNVVLLLCISERDRMLFYDIFDNLISLFVEEKYVQEIAKCKDYTEFENLMLEYVGGKMSRVPEGFPKDFLWGGAFAANQMEGAYDVGGKGLCIADINEFVDDIPLEKKYNGEVTTQYIKDAVASKDRVFPKRWGIDFYHTYKEDLKLLKELGLKTYRTSINWARIFPHGDETEPNEEGLKFYDDLINEIIANGMEPMITISHYEMPLYLTTHYKGWYSREVIDFFYRYCKVLFDRFGDRVKMWIIVNQINLIAVESFNHLGVAEDLVENIAEAKYQAVHNEMVACAKATAYAHSLDKGIRIGMMLCGGPAYPATCKPEDVLACMRHNQMEYFCADVLLRGRYPGYAFRFFEERGYNIVFGEEDEEILKNTADFMSFSYYYTRVCDKESYEKDNSAYRNKELPANPWGWTIDPTGLRYMLNVFYDRYQCPIYITENGVGYFDKLEADGTIHDPYRVEYFKAHIEQMKEAIRDGVDLRGYYAWGPIDIISCSSSEMSKRYGFVYVDQDDYGKGSGRRIKKDSFAWYQHVIETNGAELMAVENNMDDELDQVSAEAMQIIMSAGDARVSCNDALKAIAEGNVESARELIKKAEGQIAEAHHVQTDAIQGSIGGETQAYSLLFAHAQDTLMTVYSEIHMTKQLLLIFEGYEQRIRTLEEKIAKMNKFMKWLNESFAPKMQKINNNPWILTIKESIMQVMPLIFLGSIFCILTIPGDYISWWPNFWTIYNWTFGMVSIFVAFLIPFNLMEKKRRRKSRIVAGVAGLILFFQSINPQFIADQQANLESGDIAFSGFTSIGGIGAGGMFLAIIAGLIAAAIVNLLGNFSFFKEDSVIPDFVRAWFDSMLPIGLVAVLGWILTDASFLNLNLYQIVVDIFMPLQNFAQNPFGFVFIMFLYCFLYSMGISTWVLTPVVSPIMIAAASANAELAAAGMATNANLSIFTDATVYSAYLWIGGIGCTMPLVIMMLTMAKSQRMKALGKAVLVPAVFNINEPTVFGCIAWNPILMVPMWLQGIILPIIIYVLTKVIPLFPIPDILFNMWYCPFPICTWLTTRSLFGIVLMLIVFAASWMIWMPFFKIYDKQVCEEEAAEQKMLNVLLVCGSGASSGFMAANMRKEAAKRGLDMKITARSESEIENYIDEIDALMIGPHLQYLEDEMEERCEGTDVKVILMKPEYYSVLNGEKAIDHLLSVVGEMKTCGNRNYRKWLALMVSGGLAVTALAGCGGSDGGTEQSAQTEVSEGIKTAAEDNKVTTFALPDGPEESEIYVEPIADLPDDFIRGMDASAVLSLENSGVTYYNYEGKEQDVFETLAQSGVNYIRLRVWNDPYDADGNGYGGGNNDVATAVALGKRATAYGMKVCVDFHYSDFWADPKRQHAPKAWEGMSASEKSEALYDFTKESLAELLDAGVDVGMVQVGNEINNGMAGEEDVDTVMDLIASGSRAVREIADEYGKDIKVAVHYTNIDDSEEVDTMAANLQNAGVDYDLFGLSYYPYWDGTMENMQAVAENIENTYGKDVYIAETSYCYTTEDGDGFANSFAGTEDLVDGYAATVQSQATMIRDICAAADEAGALGVFYWEGTWIPVGDADADNTALWKKYGSGWASSYSADYDPEDAGLYYGGCSWDNQAMFDFTGHPLASLNVFKYLKYGATAPLAVDFIPEVAVTCDVGGEVTLPDAVEVVYNDRAANTQENVTWDAEQLAAIDTSKAGSYEVAGTLADGTAVTAQVEVEMVNYVLNPSFEDEDTSMWKVSYEGENNPTDFQNKADDAYTGDIAFHFWSGDSDMNFSIEQEFTDLAPGTYQLSAYAQGGDMSADASMELYAVADGTEWTDPFMMTTYADWQNPTVTGIKVTDGTLTIGVRFKCNVKSWGTVDDVTLNRISDMKDGQKQYRILRIDEPDFGCEGRDDGEAAYDEITLVNEQGETCLVRMEEQQVWNMGLDEGMLVWVGKDGQIRGRCKRMDISRWSEKYQVRVLTEQDVGAIYELSRKNNLYYEYCPPYVTRDSILSDLVALPPGKLPDDKYYVGFFRGETLLAQMDLIADYPERAMAYIGLFMMEASVQQAGIGTRIVEDLCRHLAEEGIRTVRLCWVKGNPQAEHFWRKNQFAPIRETQSMSGQTVVLAERRLKMSLIPDYANAVGSAMSYNRKAADTKGKEKTDGNASSEKTGKANKADRTDRTGKTGTVTGRTIGNPKLSEKAAKYYEELKRKYSNMDFILVSEDQKEKARAQAGSYANASKMVVLIDEDKIERMAEDENYRRQYEAIIANAGSGIAQMKSSLEASGTKVKGYGMQVNDGGTATYFAVLQKSSDAQKERIEKKREKAAEEKKAEARRAQKEAQEKRIRDGKNQRDEHAAERVNKTDEASEADWENTVTITASSIEELLKKISDYQQNERMNTVQTKEERLVGGHIDYKGMNPTVSIIVPVYNAKNYLQRCIDSILHQEYTDYELFLVDDGSTDGSGDICDAYAAADARITVIHKENTGVSDSRNLAISQARGTYLQFLDSDDWITPDATKLFVRAAAEHDCDLVIADFYRVVGERVSHKGDIEEDGVLTREEFAAHMMENPADFYYGVLWNKLYRRDLVEKYHLHMDVSVSWCEDFLFNLEYILHANVFYALQAPVYYYVKTKGSLASQGLSITKTVKMKFMVFEYYNEFYKNVYDEKAYEKKRLSVYRFFLDAASDGTVPPTLLPGAKKLGTERIPVCPSAISGEGILSEFYRNRKLLDRCLEAIALRNDLTLGELSLLLSLSQMHTFCSRTELADFAGLSKSSLSRTLQKLSAKDYIRVISTRKYLHVDLLPAATALLPELATAQNDFDAARFAGLSEEELICYAKVTEKIKENTMRVLGVMEHKMFCFQCEQTAGCSGCTGNAGVCGKSSATAALQDELTGALIGLAKACGNNPHTEDTTHILIEGLFTTITNVNFNDETLREMIAKVHAEKERVVPNCATCASPCGNTSDYDMKEIWEADEDIRSLKSLILFGIRGMAAYAYHAAVLGYEDETVNAFFYKALSFLGFDLEMGDLLPVVLEVGEVNLKCMELLDRANTETFGNPKPTKVPLTVEKGPFIIITGHDLYDLKLLLEQTKDKGINVYTHGEMLPAHAYPLLKQYPHLKGNFGTAWQNQQKEFDGVPAPILYTTNCLMPVKESYRDRVFTTEVVSYPQMVHIGADKDFTPVIEKALELGGYKEDTEFTGINGGREVMTGFAHGTVLSVADQVVDAVKSGAIRHFFLVGGCDGARPGRNYYTEFVKQTPKDSVILTLACGKYRFNDLDLGEIGGLPRLMDMGQCNDAYSAIKVAVALAEAFGCSVNELPLSMVLSWYEQKAVCILLTLLHLGIQNIKLGPTLPAFISPNVLAYLVEHYHIAPITTPEADLKEILGAMQQNCKKGLCLAFLFSAMFLTGWEIAGMRSRQTKETAAVAYEAGNWGLGFGAEGTQPTGNATSAELAQYDAHYVGDPSGKVLYLTFDCGYENGNTEPILDALKKHQAPATFFVVGHFLESAPEIAKRMVAEGHTVGNHTYHHPDMSSIADLTAFQKEMDDNAALFSEVTGQKMANYYRPPQGKYSTKNLEMAKQLGYHTFFWSLAYVDWNVDAQPTKEEAFEKLLGRIHPGAIVLLHSTSKTNGEILDELLTKWEEMGYTFHPLSELCEKMILLRANTELHQTFERLIEAMKVPVKWNGIFVVIDNYMILQGEVRSLFFHFDTRNVATNIIDIPVKEDEIGEVGTNMRVQNAINLILYAFGKWGTIKGVRVDKSFEQLNTLFTDIMKEMQVEPEYTPSYLRFYRSGMRITYEDVIQTAQEEEQTQPEDEETNEGGLWHKVVWKRAQAEFARADITVSERRKSRIGNNFYLVGYLCPACCGKLHMAVYPAGKEFKIETEEGGVLLARAATCNACRRFYTPRPGRLFSEGDIYTLDFATDDAAYDDYLELLGRNADRVSNYHTNVYADGRRPDTEEDGEESLEDLCNALPELSDLEVKKLSARMEEGFYPEESVEKYEAKVHSRERERHDEGRSLPQREQAAEEPDKQSGTRTPKETAKQSAGRKETDSVGSGRPADRGRGMAAETETRRADHRAAEAEMHGADRRAAEAGSSLRPDADGAGRPAAKERTGGKDIHAATQTPEGGMTVDGVIVTPEERKGVQEHYEARLAVMDRYSDRQLQELKRQLEGERKLTEDEKKPYIKKIQDRIYEGRVRELQEKADACEGKNYTLTKRVLEEVEAADLPEEQKHPLREKLQQLKQSQAEREVAAMVAKMPANLDRKQYRLYVDRLHDYDGVDLTPYEQKIVAGREAAEKQELSNMIRRARKVSRKDYVDLAERLREGDFLPGLVAPYLEKVNDRIRELDADAIAAICPAPMQMNFEEGIEAYQKIKEGDFLPELKTDALKTLEKRLSKIKADECELLVGKLKKELEENGVGENPRHHFYPARKVLLGQATPEETDVIEYAMASYAAGRGLFEYPILVVDVARDASGKEGMILTPEHLYYSTAFTSYGIPVASIASVTASTGLLNKGLYVHQKNGTKLKIPYAVGTKELPDYAGELDDFIHYLQEKPESRKLTYLASEKHDTICCFRCGYQYKGGGVCPKCGYQNNGMANKHGSLSIDSDNLFPIIKKWLYSDHDIFYRELISNGCDAITKLKKLDMMGEYTLPADFKAKISVTVDPEAKTLTFTDNGLGMTADEVEEYICQIAFSGATDFIQKYKDKSTDDQIIGHFGLGFYSAFMVADEVEIDTLSYKEGATPVHWTCDGGTDYELTDGTKTTIGTQITLHLNEDCLEFANEYRAREVIEKYCSFMPTEIYLSKANAEPEYETIDAADKRDTDTVVEEIHEEAKTEEKENENGEKETVEISPAKDKLKILKRPVPLNDTNPLWLKNPNDCTDEEYKAFYRKVFLDYKEPLFWIHLNMDYPFNLKGILYFPKINTEYDSIEGTIKLYNNQVFIADNIKEVIPEFLMLLKGVIDCPDLPLNVSRSALQNDGFVKKIEEYITKKVADKLIGMCKTDKESYEKYWDDISPFIKYGYLKDTKFCDKMNDYILFKNLDDKYLTLPELLVKKEEKKEDADAASDVVDKDGNSVTEDADAKDDSEEKKDERKVIYYVTDKVQQGQYIKLFKEQGMDAVILDHNIDTSFISQLEQRNEHYKFMRIDADVTDSLKDANDAADLKEETDTLTDLFKKALGNDKLTVKVEKLKNENLASIITLSEEGRRMQDMMKMYAMGGMGGMDPNMFAADQTLTLNANHALVKYIFEHKDSENVPMFCEQLYDLAMLSNQPLSVDAMSKFVERSNKIMMLLAKMRVNFAPRPAFSIGKSLLFHIIFTLLIEVRSYEDLAASVSYLKEHHLHPFDETPMEFAEKLITLRKSRELTQEQLAEQLNVSRQSISKWESGQVIPEVEKIVELSKVFDVTVDYLLKPSEIDELSVKTEILEQQQKQMLVREQKRTQISKNIMYSIGIYLIFFAVYFIGHFYFEIWNASVILAELLIATAIVVFVLVRSFSDKSMPNDGLAKNIVCMPDMLLILFVFGHGKSPFLNNGRERQHFVLSPSMSQLLPYETIVKASEGDPEAVAAVLSHYAGYIRSCAKMDGQINTDMQEHIVGRLIESLLKFRFDRMKKKYNTPHRSHVVKTRMTEEEYADFTERLKHYDMSQAEFIRQAITRATIRPIVTVSPVNDELLSAVGRLTAEYGRIGGNLNQIARFLNEYGTPYNALSVEVRAAISDLAALKFEVLRKVGDAVGNIQAYQLMATFKHISSKNADYGAAEQYLTFEHDEFTMKPTLDEAGRLVPRENYRIATLNCGEEDFAVACMRSNLRYGKNQKREDVKSHHYIISFDPRDGPDNGLTVDWAQALGEEFCAEHFSGHQAIVCTHPDGHNHSGNIHVHIVINSLRIEEVPLLPYMDRPANTRAGCKHRCTDAAMEYFKAEIMEMCHRENLYQIDLLHGSKNRVTEREYWAQKKGQLALDKENAAALAAGQPVKQTKFETDKAKLRQAIRDAMREAATFDEFSALLLRQGVTVKESRGRLSYLTPDRTKPVTARKLGDDFDRAAVLAFLEQNAYRAAEQTVPIPEYHTTETNRTGRGKTQKITPTSTIQKMVDRSAKRAEGKGIGYDRMAATVAAMEQYGFTPEELDAALVSANADLQRSSAKLKPIETAICEKKELQKQVLAYAKTRDVRDGLKKQKSDKARRAYREKHESDFIIADAATRYFKQKGVTKLPTYKALQAEIEQLTAEKNALYNEYRANKARVKELHTVKSNLSQILQGEKDREKKHKHERMTPRNYIFTDLSAYTSGNGRKEREMPRMSKKRRLEWSFFLNHRNRITYNDLCRGCTHGCKQSFRAIIVLCPRYFSKRWKHREDTANGRMADNRKYYYLKLKENFFDSDSIVLLEDMKDGILYSNILLKLYLKSLKNGGRLQLDEHIPYTAQMIATLTRHQIGTVERALAIFQQLGLVEQLDCGLLYMTDIELMIGQSSTEAERKRAARLENKALLPPRTNGGHLSDIRPPEIEIKKEIDIELEKEGELKGQALARNYGRYENVFLTDTELSELQAELPEKWAYYIERLSGYIASTGKKYKNHAATIRRWAADDTAKAAPKQGIPEYTCKEGESLMSNLFTERVLNMAAVTPQPEDYTGEDGLLYCGKCHTPKEAYFPEKQAALFGRDRHPAECDCQKAQRLEREAAEQRRKHLDTVEDLKRQGFTNPTMQEWTFANDNGKCPQMEIAHFYVEHWEIMREENIGYLLWGKVGTGKSYFAGCIANALMEQEVAVRMTNFSAILNDLTASFEGRNEYIERLCRFPLLIIDDFGMERGTEYGLEQVYNAIDSRYRSRKPLIVTTNLTLDSLQNPLDTAHARIYARLLEMCAPILFTGENFRRETAQAKLNRLKELMKMAENKQNTTPERRPDCVTEIRMGNTVLVVSGFFKKDTTDTAADKMMKVLEAEAAAGHKAQLSPMLRQTTQKITALYPRLSHEDELQGESNSISNQKRILETYAKQNGFSNLRWYTDDGYSGANFQRPGFQAMLADIEAGKVGTVIVKDMSRLGRNYLQVGMYTEMIFPQKGVRFIAINDGVDSAQGDNDFAPLRNIFNEWLVRDTSKKIKAVKRSKGMSGKPVTSKPVYGYLMDEDENFIIDEEAAPVVKQIYRLCLAGNGPTKIARMLTEQEIPTPGTLEYRRTGSTRRYHPGYECKWATNTVVHILENREYMGCLVNFKTEKPSYKTKHSVENPIEKQAIFENHHEPIIDTQTWERVQELRKQRKRPNRYDEVGLFSGMLFCADCGSVMYQQRYQTDKRKQDCYICGNYKKRTHDCTAHFIRTDLLTAGVLSNLRKVTSYAAKHEARFMKLLIEQNEDGDKRRNAAKKKELEAAEKRIGELSAIFKRLYEDSVSGRISDERFTELSADYEAEQQELKERVARIQAELSKAQEATVNAEKFMNIVRKHMNFEELTHTLLREFVEKIVVHECSYDANGTRRQDIEIYYSFVGKVDLPEMKPDYYDEFQCIADACSLTCCQEWKIAVDRKTAAAWKKTETPEGVCPKRRTLSDYTKKCGDGRIITLDEKMRCPFLDERKLCRLVLTYGDAVLSETCTLFPREKHEVAAGITEYSLMPCCPAVVDLLWGRECIRFSDEADSVSYGAYEAVYGVRKRFLTIMSDRAYRPAQSLCMLFYMALDLCDAGTSWKAEVPKYGDAPFRKELADAVEHAGADCRAAFVERNELFLDLAENYRKEGLYRAFLTPAAEEAEQIAEDYGKIRKEDLDAFAQAFSPYEALMRCYLQSEIFSECLGEPDDVEYVTVKLQWIALEYAAIRHAAFLCWHREGALSYEIMRSCMVILSRMLGYEDEDIWEYLENSFERLIWDWGYFALVVSMSILNVEHLTHGFGDRVILDDVSFRLLKGEHIGLVGANGEGKSTFLNIVTGKLMPDEGKVEWAKNVRVGYLDQHSTLTAGMTIESVLKSAFSWLFALEEKMNQICDALGEADESQMDAMMEELGVIQDTLTMHDFYTIDAKVEEVARALGLLELGLHHDVTDLSGGQRMKVLLAKLLLEKPDILLLDEPTNYLDAEHIAWLTRYLQEYENAFILISHDIPFLNDVVNIIYHMENQHLDRYVGNYDKFEEVYAVKKAQLEAAYRKQQQEISELKDFVARNKARVSTRNMAMSRQKKLDKMDVIELAAERPKPEFSFPVGRTPGRYIFETKDLVIGYEEPLSKPLSIALERGHKVALIGANGIGKTTLLKSLLGLIPALGGGVEQGENLMIGYFEQEIKGENKRTCIEEIWEEFPAFSQYEVRAALARCGLTTKHIESQVRVLSGGEQAKVRLCKLMNRETNVLLLDEPTNHLDVDAKEELKRALKEYRGTVLLICHEPEFYQDIVGEVWDCSKWTTKILMTEILKAIIFGIVEGITEWLPISSTGHMILLNEFLTLDVSAQFWDMFLVVIQLGAILAVVVLFWNLIWPFARSSSEAVVAAEQNEKSGSLVKREYWVLGPVTVRMPVIINWCKIVVSCLPAIVFVVLGLDETCDRLFYNPVCVAVALIVFGVAFILVENHNAAKQARVEQMRDITFQMAILIGLFQLLAAAFPGTSRSGATIIGALLIGVSRKAASEFTFILAIPVMLGASLLKLMDFGLHLTGTEWAVLLSGMVSAFLVSVVIIKFLLGYIRKHDFKVFGWYRIGLGVVVLLYFFLLKMTKDMTSGSPMKLILGFSVPLLFGFLFQQFYNLVDTLIVGRFLGVDALAAVGSTGSLNFLIIGFCMGVCNGFAIPLAHRFGAGDYKAMRAFMMNAVYLAVIFSAVMTVFTVAFCRPILQLMQTPENIIDDAYTYIVIIFAGIPATYLYNLVSGVIRSMGDSKTPLIFLALAAFVNIGLDLLLIIVFPMGVAGAALATVISQAFSGIACVIYSKRKFEILHTDEEERKVNKGYMKTLCGMGVPMGLQYSITAIGSVILQSAVNTLGSNAVASMTAGSKIGMFFCCPYDALGSTMATYGGQNVGAKKLDRLSGGLKAAGILGIGYSILAFVVLWLCGNQLAMFFVESAQAEVIANVRLFLVCNSAFYIPLAFVNIVRFLIQGMGYSKFAILAGVFEMAARTLVGFVFVPMFGYPAACFASPVAWIFADCFLFPAYFHVLKKTKKMLSEPVRTSVAMRKRWAMGMTACACALSMALTGCQIGNKDIVVSGTLSSRQVFTLDKSACSLKEAKVYLANYQNIYGTAYTIDLWQHDFGDASLLEYVKDITLEELTRVYTMDLLAQSQEVTLSEDETAKVAEAAKEYYASLSEDETAYMDVAEADIAEYYTHYALAQKLYHSLTNGVNEEVSDDEARVMEIMQIYVTDEDRAHEVEQKLAQGDDFASVANNYNELSAIQVTVSRDDLPDEVEEVAFQLDDNAVSGMIAAGNGYYFIKCLNKYNEELTEANKSNIVEKREKEAFDDVYNEFVASLSSRLNTDLWDGIELTTDGSIQTNSFFAVFEKYCGEIMKNYDVIIIGAGPSGIFCAYELIHAKKDLKVLMIEKGRRIENRECPKRKTKVCVGCKPCSITTGFAGAGAFSDGKLSLSPDVGGNLPEILGYDKTVELLKESDDIYLKFGADSKVYGVDKEKEIREIRRKAIMANLKLIECPIRHLGTEEGYKIYSRLQEHLLEEGVEMEFGTMVKDIIIEDNQVKGIITDKDETYTAAEVISAVGREGADWFSHICNQHDIETKVGTVDIGVRVEVRDEVMEFLNENLYEAKLVYHTPTFDDKVRTFCTNPSGEVATEYYDNGLAVVNGHAYKSKDLKTNNTNFAILVSKNFTKPFKTPIEYGKQIAQLSNMLCDGKILVQTFGDFKRGRRTTEERLCRNNLIPTLKDAVPGDLSLVFPHRIMVDIEEMLMALDKVTPGIASDETLLYGVEVKFYSNKVVVNSDFETSVKGLRAIGDGASVTRGLQQASANGISVARSILKNIMMYDEMCLDTFLAQQEKLFREPVAESREEAEEFLSDCFATVCENLKEVRAYFKEEGADIAGMSSEDLAEQAEVFALPDGRYLIVEAMGQIILASASPRRKELLEQIGISFEICPAKGEERITKSVPHEVVEELASQKAIEVASMVRTYAETHQELVTPSDLMVIGADTIVSCGGQILGKPKDERDACHMLKLLSGGTHQVYTGVSIVLLDASGKAGQVTFHEKTDVTMRAMSEEEIRRYVATGEPMDKAGAYGIQGKCAIFVDKIDGDYNNVVGLPVAAIYRELKKLGIDIYLWMGVSWTREQQQVIDLRKRNILVSAAAGSGKTAVLVERIIKMITEGEHPVDIDRLLVVTFTNAAAAEMRERIGAAIEKALEEHPDSEHLQRQLTLIHNAQITTIDSFCLYVIRNHFHEIDLEPDFRIGDEGELKLLKEDVLRGVLESNYEQMSPEFAAFAKGYVSGKSDAKVAEMILSLYEFSMSYPWPMEWLTSGICGYEISDVQEMAEAPWMQPLVLHLRSVLADLVKKLRIAHVLTREEDGPDIYEKVIASDLAKFEGLAACENFLELYEKLTAVTYDRLPSSRGFSGDAGKLSRVKELRDQVKDTVKKINKQYFFASPEVMCGQVRRAEPMAKELVRLAIAFSEAFAAEKRRKNLVDFHDLEHFALEILVDAKTKQARAAAEEFRDMYEEIMIDEYQDSNHVQETLLRAISREERGAYNLFMVGDVKQSIYRFRLARPELFMEKYDTYTLEESSTQRIDLHRNFRSRSEVLDMTNDVCYRIMARDLGNVAYDEDAALYAGADYCAPHEAGMFAPEILVADSAEELLEGSGYEDRKLYEAKLVAERIRKLMTEQKVTDKATGELRAVRYSDIVILLRSLSGYADSFAAVLNEAGIPAHTVSATGYFSAVEVQTVLAMLRILDNPRQDIPLAAVLKSPIAGLTDEELGRLRAHDRSVPFCECVLARCRELAQSEEPLAEGYEKKLWEFWKLYERLRALVPDTPIHELIEIVLKESGYGNYAAAMPAGARRRANLRMLVEKAIAYENTSYKGLFHFVRYIDELQKYDVDFGEADMVGENEDVVRIMSIHKSKGLEFPVVFVCGLGRNFNKQDTRSRMVLHPELGIGIDWIDGERRIKTPTILKRAIAKQIELENLGEELRVLYVALTRAKEKLILTGCRKDAENDLAALREEAQEELFTETVHVPLPYLLRESAAGYFDWLLPAVFSYHGRYQVRVVPAEELLDEECQREEVETENLEQCLSRIAAADAADVAEFDGKFSFTYPYERDLERKNKYSVSELKHRAMREKLLEEEKDVIPAFLETEGKSYVPPFVQKKMEQQENGGQNQGALRGTAVHRVMECYHFSAAAGVTEQIETMLAGGQITEEMKRLVKPALIETFLASSAGERMKRAELAGTLYREKPFVMGFTGEELAAFGFGDGEKCADDKELTLIQGIIDVFWIEEDGIVVLDYKTDRVKNEKELADRYASQLKLYGEALERIYNHGSERTLRVKERLLYSFRLGAVIPVMSLQFVFGNSGSGKSDYLYQSILEEAEREPEKNFLLLVPEQFTMQTQRELVWRQPNHAIMNVDVLSFVRLAYRVFDDLGMQDLVILEETGKNLVLRKVAELKKKELSVLGGNLNKMGYIGEIKSLISEMAQYNITPEDLGAFLGGQDVGDTLRCKMQDILTMYEGFREYIDGKYITAEEILTLLCEVAEESELIRDSVIVFDEFTGFTPIQNRLLRVMLPLADRVIVSLSMDIREDFYHSRGVHELFSMSKETVQTLLKIAADAGCEVLSPVIMEPGEHRRYENAPELFFMEQNLFRPMYQKWPKPVNDISITSLKDPRQELSFVAREIVRLVRTKGCRYRDFAVVTGDVPQYANYVPETFAQYGIPFFIDQTRNILFHPFIEFIRAALEVVEFDFSYQSVFRFLRSGLAGRLLTESCTEQTADEDGAGAKARGGVNDKDGAKAKAGADEDGVGAWADDEDVIDRLENYVLAKGIRGRKRWSEKWTSVMKRDARYPEAAQEEMALLNRARERIVLAFEPLCELFSGKKYTVAEQTYGLYEFITALDIEAQLREKQFLLEQAEETEYNGVRRNQTRAQEYGQIYKIVMDLFDKVTSLLGEEQMSIREYTDILDAGFSAAKVGMIPPGNDRVTVGDIERTRLNHIRILFFVGVNDGIVPKAGSTGSIISQFEREKMAEHHLMLAPGAREKVFIQKFYLYLNLTKPSDGLYVTYSRVSPEGKALRRSYLIGTLCNMFPELKIREPEEETEASAILTPESGIDYLLEGLWTEQKSHTWEALAKWYLSDETYHAKALRLLAASFYRYSGEPIGKEVARALYGTELENSVTRLEQFAECAFAHYMTYGLGLSQRELQEFAGVDMGNIYHDALWHFAERIRRSSYTWYDLPEQTREAWIEESMNDAIAGCANVGAFDEAKNRYLLSRMKDTIRRTVWALTIQVQKGRFTPSDFEVSFSQADHLEAIRFQLTEEEKMRLRGRIDRVDTCETDDKVYVKIIDYKSGNTTFSLLNLYHGLQLQLVVYMNAALELEAKKHPGKRAVPAGMFYYHIEDPMVDGSGTESEEEIRQTVLEELKPNGLVNDDPEIYGAMDTELSGSSAVIPVALKADGSLKATSKTASTEEFGTISDYVKETVTKAGRRILGGDVAAAPYELDGRSGCDYCPYHMVCGFDARIPGFSYRKLEKPDGAEAILAKMRETQNEEKRQMLPVHPVNRIDRLAPESRKQQRSKQQPSSSFATLLHQAMTVTEEEDVHSFDATAMKFLDAEFVQGFIRMANDGWEQGWHERNGGNLSYRVKPEEVEAVRENFQEKEWQPIGTTVPNLAGEYFLVTGSGKYFRNVILKPEDSICMIELDEKGENYRIVWGLVNGGRPTSELPSHLMNLEVKKLQNPKYRVVYHAHTTNIIALTFVLPLEDRVFTRELWEMATECPVVFPAGVGVVPWMVPGGREIAVATSELMKKYDLAIWAHHGMFAAGEDFDLTFGLMHTAEKSAEILVKTLSMRPDKLQTIQPDDFRHLAEDFHVTLPEEFLYEKMTGYEAAKAKYETLGVDTDRAIERLKKVPVSLHCWQLDDVIGFDNDGGLTGGIQTTGNYPGRARTPQQLMEDMEEAMKLMPGTAKLNIHASYAIFEPGEFADRDALEPKHFAKWVEFAKKHHMGIDFNPTFFSHEKVKDGLTLSSPDEETRKFWINHGKACIRISEYFAKETGMPCVMNIWTGDGFKDVPADRMGPRLRCKDSIEQILSEPYDRNLVKPCVESKVFGIGVESYTVGSAEFTLSFAAQHEGCMPLMDNGHYHPTEYVSDKIPAMLCFYPEFALHITRGVRWDSDHVLLLDDETKEMAKEIVRNDALDRVYMALDYFDASINRVLALATGFRSWQKALLTALCTPNEMLKELQDTNQLGKLMVMHEAVKMLPIGEIWEEYCRREGVCDDLHFYDEIERYEREVLTKRGMETTYYLAVDIGASSGRHMLSHQEDGKLVLEEIYRFPNGMTEKNGHKVWDVERLFAEILNGMKQCVRLGKIPHSMGIDTWAVDYVLLDGQGGRIGDAAAYRDGRTQGMDEKVYAHITEEELYHRTGIQKQIFNTIYQLAAVREQHPKWLEQADCLLMMPDYFHFLLTGKKVQEYTNATTTQLVSPVTKDWDEQLIRQLGYPRRLFQEIRMPGYELGSLRGEIQKEVGFSCKVILPPTHDTASAVAAVPTQEEETLYISSGTWSLMGTERMTADCSSAARAHNMTNEGGYDCRFRYLKNIMGLWMIQSVRKESAPELGFGEICARAAKETIASRIDVNDARFLAPENMTEEVRRACREAGEQVPQTIGELAAVIYHSLAQCYAGTAEEIEALTGKQYPEIHIVGGGANAQYLNRLTAEYTGKTVEAGPTEATALGNLAVQMIAAGEFEDLSAARACIADSFTMEKFEGEKGETRMREELLNELMVISEEEKKYRAGQGMVERQLYARESIGEIDRELLLKRGRLITVRPHSRFVDFPEHRHNYVEIMYVVQGSITHIIEGKELTLHKGDVLMLNQQVRHAIRRAEYEDIGINFIALPEFFEVPLSMLHEKNVLAEFIAGAFGQKNPVSHYLLFRLKEQPQVENLMENMIESMLHEHSDEDVMNQYTMGLVFLYLLNHLENLSHNSSMDYRETIVQAVLGYIKSDCKNANLTKIAKDTHQSVSVLSKLIRQKTGDTFKELLQQRRFETAAHLLKETDLAVEEIALDVGYENLSYFFRQFKSRYGVTPRAYRVMNSRDAGNLDENHRELMQKRSFGRTKEGREVTEYTLVNAQGMTLSVIDLGATIVSITMKGSDGNIYDVVLGYDTPVDYQNNTCYFGAVIGRNANRIDHAHIHLDGKDYSLEANDNENNLHSGSHGFHAVIWDVVQESAQSITFSYVSRDGEQDFPGNMTAKVTYTLDDNGEVAIAYEAVCDQTTVANFTNHAYFNLDGHDSGVMEGQKLELHASYYTPVIDSKAIPTGELAKVAGTPFDFREMKEIGRDIEADDTQLRYAGGYDHNYALDKADGTMQLAARARGAKSGICMDVYTDCVGIQLYTGNFITPQTGKGGVQYDRRHAFCLETQYFPNAVNEKNFKSPVLKAGDTYRSVTKYCFGLEKMLEELKKQVYEANMELPRRGLITYTWGNVSGIDRESGYFVIKPSGVDYDALSPDDMVVMDLDGNKIEGRYKPSSDTATHIELYKKYEEIGGIVHTHSPEAVAWAQAGRDIPLYGTTHADYFFGPIPCARNLTPEEIDEAYEKNTGLVIIETFETRGIKPMYTPAVLCANHGPFTWGKDAAEAVHNAVVLEEVAKMARNTELINPKVKPAPDCIKEKHFYRKHGANAYYGQNMSEVKIATRESYGNALVELGGEHENLVVLDADLAAATKTGMFKKAFPDRHIDCGIAEANMTGVAAGMSTCGFVPFVSTFAMFAAGRSYEQVRNSIGYPHLNVKIGATHAGISVGEDGATHQCNEDIALMRAIPGMVVINPADDIEARAAVKAAYEYVGPVYLRFGRLAVPVINDGADYKFEIGKGVTLREGSDCSIIATGLCVSEALAAADTLAEQGIHAEVINIHTIKPLDEELVVKTAKKTGRVFTVEEHSIIGGLGAAVAETLGEKCPTKITRIGVNDVFGESGPAKELLHKYELDAEGIANRILREMKMDKLALQKMAVEVRKGIVSSVHSAKAGHPGGSLSAADIFTYLYFEEMNIDPKDPKKEDRDRFVLSKGHTAPGLYSALANRGYFPVEDLLTLRHTGSYLQGHPDMKHIPGVDMSSGSLGQGLSAACGMALAGKMKQQDYRVYALCGDGEIEEGQIWEAAMFAGFRKLDNLCVIVDNNNLQIDGPIDEVCSPYPIDKKFESFHFHVINIDGNDFDEIKRAFDEARATKGMPTAIIAHTVKGKGVSYMENSVGWHGKAPNDEEYAVAMEDLRKAGEALCQKMKFFIDTANVEDIRKANDMGVICGVTTNPSLIAKEGRDFNEVIKEITTIVDGPISGEVKATTVDAEGMIKEGREIAAIHPNMVVKIPMTVEGLKAVKVLSAEGIKTNVTLIFTANQALLAARAGATYVSPFLGRLDDISTAGIDLIQDIVQIFDNYGLETEIIAASIRNPIHVTDCALAGAHIATVPYKVIEQMTKHPLTDAGIEKFQADYRAVFGDMSKRHPPVNENGTGADPDTHIGCAHKRRKGEEYEVFYMLATKNYKFWFCTGSQDLYGDECLAHVAEHSKIIVAKLNESGVLPYEVVWKPTLITNELIRKTFNEANVDEECAGVITWMHTFSPAKSWILGLQEYRKPLLHLHTQFNEEIPYDTIDMDFMNENQSAHGDREYGHIVTRMGIERKVVVGHWSDVNVQERIASWMRTAVGVIESSHIRVMRVADNMRNVAVTEGDKVEAQLKFGWEVDTYPVNEIAEAVAAVSESDTNALVDEYYDKYDILLEGRDPQEFRRHVAVQAQIEIGFERFLDEKNYQAIVTHFGDLGALKQLPGLAIQRLEEKGYGFGAEGDWKVAAMVRLMKIMTAGKKDAKGTSMLEDYTYNFVKGKEGILEAHMLEICPSIADGPISIKCQPLSMGDREDPARLVFTSKEGSGIATSLIDLGNRFRLIINDVDCKKTEKPMPKLPVATNYWTPQPDLYTGAEAWILAGGAHHTAFTYDLTAEQMGDWANAVGIEAVYIDKDTKIREFKKDLMLGNLFYRMGNAKERIESGKAVLGIEFGSTRIKAVLVDETHQPIASGAHDWENQLVDGIWTYSLDMIWDGLRDCYRKMTEDVQNKYGVAVTKLGAIGFSGMMHGYMPFDEKGELLVPFRTWRNTITGEAAAALTKEFSFNIPQRWSIAHLYQAILNGEEHVDKIAYFTTLAGYIHWKLTGEKVLGVGEASGMFPIDAKTRDYNRKMLAQFDALPAVGKYTWKLEEILPKVLVAGENAGTLTKEGAKLLDPSGRLEAGIPLCPPEGDAGTGMAATNSVAVRTGNVSAGTSVFAMVVLEEDLKAVHEELDMVTTPSGDTVAMVHCNNCTSDLNAWVGLFREFAENFGINVDMNELFGKLYNKALEGDKDCGGLLAYNYFSGEPVTGANEGRPLFVRKPDAHFNLANFMRTHLYAALATLKIGLDILLKEEKVKVDRIYGHGGLFKTKGVGQGILAAAMDAPVAVMETAGEGGPWGMALLASYMLQKADGESLEQYLSEKVFGGESGSVMEPDPADVAGFDAYIKAYKAALATEKEAARTMPLMKYRMKHAPMGWNSYDYYDTTVTEREVRANADYMAAHLKPYGWEYIVVDIQWYAKNTGSQREKYQYIPFGEVSMDEYGRLLPCTDRFPSAKDGVGFRALADYVHGLGLKFGIHIMRGIPREAAHRHLPILGSDALASDIADPSSICKWNPDMYGIRMGEPGAQEYYDSIVALYAQWGVDFIKCDDICNTNLYVEHPYSAAHEIEMLQHAIEKCGRDIVLSLSPGPALIEKAWHYETYANMWRITDDFWDTWELLYDMFRRCELWQNHVGCGSFPDCDMLPVGRLGKGFGQERQTNFTRDEQKTMMTLWCMFGSPLMIGGELTKLDDWTQFLLTRRELLQMLDADYVGRQVARDQKHAVWSCVNEKKDERYLALFNFMEQPARCEVALPETEAFADMCGQTGTIRARELWDGTELIVQNDSLSSEIPAHGVHVFRIDKKMDKRLKYYDLMEQLHGKIMSGEIRPGEKLPSENELSAEYGVSRQTVRKALQILQNEGYIYAEHGRGTFCSEMLRHTTPSKNIAVVTTYLSDYIFPRIVQGIDQVLTENGYSILLKNTRNSRSLEAKCLEELLQKDIDGLIIEPSKSQIFCRHVNLYEMLDSYHIPYVFIQGVHAQLLDRPQILLDDCRGAYLATRYLIELGHRRIVGVFKSDDTQGQQRHKGYVQALQEAGIAYDPDKVIWFYTEDRKTHPFERIRQMAKDRGNHPFEAVVAYNDQVAIEVIRALNEEGLSVPQDVSVTGYDNSYLAQTCRVPLTTISHPQEELGAAAAELLLRIIREGNSNIEGKCVLMEPELVIRESCRRRDDTDMTQDEMAVKYYAVAVGKKPGIYTKWDECKAMVHGFPGAVYKSFKTLEEAETFLESAPARGGEAHAKGAAQQKATQGAAQQKSGTAGDGKAETRGAESAGETEDLPENYAFVDGSFHAGTGVYGYGGFLIHAGGKEVLQGAGKEPEMASMRNVAGEVLGSMAAIEKALELGLKDLTIYYDYMGIEMWAKGLWKRNKKGTVAYYEYVRSVEDKIRLSFVKVKGHSGVMGNEEADRLAKEAVGITGMSRMHWWIMAVGAVFFLWFFIPAFVVVNIGNITGMAVSALVLLYGIFYRQVQDVAGRLWQTRGGRVGLSALGMVLLFILLIVTVETAGMIRSAANRAPENTTAVVLGCSVKGERPSRVLSERLCAAYEYLNRNPKAVCVLSGGQGDGEEISEAECMYRYLTGRGIDGARLLLEDRSTTTAENLQYSMELLQQHGIDGPVTIITSEFHEYRANQTAKRLGITSYSTPSRTFFLYLPTFYVRELYGILYYKISKMQDNLREELIKQFPAEVVELVEPSGKKFYACPTCKRVVTLNESKCAGCSQVLSWDHIRQEEMVKGVKTATLKFEVGGDFNKGDCRKCPLSYIAKENNENVYECPLKMRANCKLEISMKHAKAVRRIIFTVLIVAAVIVGFNTYTADYYHAKDYELQTTEVSETDAYIAYGDPQSETGLIFYPGAKVEETAYAPVMDGLAQQGIFCVTVKMPAHLAILKPNAADEVRQEFGEVKHWYLAGHSLGGAMAGSYAAKHESELAGLIFLAAYPTRELQTLPVLSLYGSEDGVLNMEKYQEAIGLAADCREYILEGGNHAGFGNYGPQKGDGEAGITDREQWQETIDYIMDMIRMVPHMENKKQDCKKIEELKRQYAGSEMSGEQVEQMKKRIEEAKMEKRNESRKMHTVRNIVAAAAAVAAVFVVLPNTSGSVAYAMGNLPVVGKLVEAVTFRNYQYDNGGHAADIKTPELTVKESDTEQMTDTEVQVQENLKKTTAEINAEIEKITDQIVSEFEESRKEEEGYQEVVVKHEVISTTDDYFTLKLMCYQAAGSGAEWDYYYTIDLKTGERLTLSDLFQSGADYITPISENIKEQMQQQMAEDDGKMYWVDNAEVPEWNFDKITDETSFYLDSDGHLVICFNEGDVAPMYMGCVQFVIPDEVVADIRKMFFSGKNHKEQKIEQLLLENYNKYYRLAYSYVHHEADAADIVQNGAYKAIKNSDALKQEEYAQTWIYRIMLNEIFGYVKKNREVSLDEMPAEEGREDRYENIDLRRALDAMEERDKAVIELRYFEDMKLEDIARVLGENQNTVKSRLYRGLKKLRLELTDTWQWEMQKNRVMLVADDIDVNRASFRAMFEEEYEVLEAGDGNETLKILEERKVDIVILDMCMPVKSGKQVLKQMKADPKLLDIPVIVKTVIGEERELEMLEMGADDFIFSPCEPEVVKKRVSNIMTRYETLAERLESQRHLSTVREHLLFQVARTVRTDVAVIEECYREMTGQRTENKSVGLEDMYRHLEHIRELTDSVLDGQIVGVGESVCDTFQISDVVAELTSECRTICTEMGIEVTVQEGEIFCEYLVGDVRRLKQIWARLLKKAYINARPGCRIFTGYREVRTGEDELELELAVQGSIDGGEDYPLIKSLVELLHGTMCVEVREDAQILCRVFLPFRIGKAIGQPKSFAGLKTLLLDDNELSRDYHAAVLARLGLPVDVVQNGADAVAYLRRAASKGTAYDLCFVNWYMQGGEPFIRSVRENFPKGSLTICCSTNEKELVECQMLAAGVDCVVERPIYQEGMYRFLTELCRQESGKNGTGSEKIMGDAKSIKERGILEQVIKSELDFITYVDVHTGTFHVIVTNDDTDVTPPPEGDYTQVNAQMIPLYVHPKDREACAAALELPHILSELEQRDDLVVSYRLLCGEVYRRKELHISYQQDDRDTVVLVRRDVTESYEEEQRQQERLMSALFDARHANQEKNEFLERMSHEIRTPMNSIIGLTYLTREYVNNEKQVLENLDKISQSARFMLSFVDDILNLSQIESGNVALNSQKVVLDAFLEETVEEAMRQAAERRVHFAVDRRGSFDATYCFDAEKLERALSNILENAVKYTMPDGRVDFIVEHTGDDGEDAGFRFEIRDTGVGMAEAFIPHMFEPFEQEDEGITTLNGGTGLGLPIARNIIEFMGGHIDAYSEKGKGSTFIVNVNLKRVRNSGEKLRGQGDIQAPDYDFTGKRALLVEDNEVNIEITRNILLHKNLQVDVAVNGEEGVTHFLSHEPGYYDVILMDIRMPVMDGLTATRKIRESGREDGKTVPIVAMTANVFEEDVRKSLDAGMDAHLSKPIEITQMYAVLDSMIYRMERRYIESRLWTCLTSAFLEQVRSRYHFEEKDKALLKGVASDLAGCLKWKEAAYLMFEDGTDTVRRATAVVTLGSDVDLLQERYQNTGRMLESYMLESIGGELLMLGYGMLEAWIRENTGYQVAAYHFFGDDEAHPLSAMPEILARAKQHKVVCTAGYCLKPKKSVVFEMELAPAEACGETAHGGRICAHCSRRDTCPNRRMKITTRKVAIVGCGLVGSTTAFSLVTQGVCDEVMLIDINEERAYGEMLDMRDSIEYLNRNVKVKTGTYAECGDMDIIVITAGAPPKQGQTRLDTLEMSAKIAKSIVEPIMKSGFDGIFIAISNPVDIIAHYIYKLSGLPKNQVIGTGTAIDSARLQNMIAQTVNVDPRSVHAYSMGEHGDSQMVPWSTVTIAGKPFYDVIADNKELVGDVDLDELVYRTTQEGWEIFNRKGTTYYGIATACVGVIKAILNDENRIIPVSTLLEGEYGERNVYAGVPTVLNRSGAYDVLEIHMTPGELARFKESTRVIREYTDRIMKLNLMLPQEFLERMENMLGEEYPAFLKSYDIARYQALRLNPQKGDDVSFLNRGVFSLERVPWAEHGYYYTAKDTPGKHPYHEAGVYYIQEPSAMAPAAYLTRQMADGAGERILDLCAAPGGKSTQIAAVMAGRGILISNEIHPARAKILSENIERMGIANAVVTNETPQRLAEHFSEYFTRIMVDAPCSGEGMFRKNEEACEQWSTQNVELCAHRQDEILDCAASMLAGGGRLVYSTCTFAPAEDEGSIGRFLERHPEFYVEEVPLAEGMSHGLGELSTTIRLWPHKLRGEGHYVAVLRKEGTLADGGSGLLKNGYENGITAGDSKSAAAGIPEYLAFAGETFAGDALEKYAGRECRYLKFGEQLYRIPEGMPSVKGLKVLRPGLHLGTAKKGRFEPSHALALTLHAADVLHTMDLPSDGREIRGYLNGETFPAQGEKGWYLITVDGYSTGWGKLAGGIMKNHYPKGLRKRLPMHEEILKREYKAEKQRKEEMRYDQMDCLLLAGEEKTERTIPVCETVFPEKFADLNAVREVLLTREKQVYALIAPAFMGQFGEGVSPGAIRAALKRAGFSGMVEVAVFADILTLKEALEFDRHVNRDTDFLLTSCCCPVWVSMIRNIYGELVPHMPGAVSPMIAAGRAVKKMHPDAVTVFIGPCLAKKKEAKEPDICDAIDVVLTFQETAMLFEAMGIAPQQMEEDASEHSSGAGRIYARTGGVSEAVVRTVEQLHPGRKIAVRPMQADGGKACKQMIEAIQAGNTEANFFEGMGCVGGCVGGPRALLPREEGSAYVDHYGKEALYQTPLENPYVIELLEKLGFSTVEDFLEKSDLLTRHFMCIKLQRKKCAKNKKEDVWASLKEKAGVKDGEHTQIAMNILIWILMIVGGAAGMLSTAYLVLAMPVIFGWKVYRKLKYHIGLYDMLVAAALPNGVRESGPLDSVKRMGQTGGQEFCPDRKQTGAMVAAPNEERPEVEAAGRELSEAHVIETLRQKSAYRYRNVQQLRLLVWLLECGLAGLLGALFLLAGRERGQQWELIPSGRRIVAYIRRADGKKNGLVSSIKMRREEEVRLTHSGIFAKDGRRCVSVRFERGRDVAEAILPACRVTKNEGFTDEEVRGLEQYLESKNDEIFAKAKEINPIRGILMSDKANIAAAVLAHVDAGKTTLSEALLYESGMIRRAGRVDNKDAFLDTFALEKERGITIFSKQAVLKLPEETVTLLDTPGHVDFSAEMERTLQVLDYAILVISGADGVQAHTRTLFGLLAKYEVPVFLFVNKMDQPGTDQEALLLELKKELHENCVDFSDQESAAFAENVAVCDEQVLEQYLAGEAVGTEQIKRLIRERKLFPCYFGSALKMQGVKAFLADFIRYASIPAYGETFGARVFKIARDAQGKRLTYLKVTGGSLKVRQVIGEEKITQIRIYSGEKYETAEEVGAGGVCAVTGLLRTFPGEGLGAEKASRLPVLEPVLTYQIILPEEVSPAVMLPRLRELQEEEPQLHIVWDETLREIQVQVMGEVQIEVLSELIRQRYGVQVTFGAGRIVYKETIAGTVEGVGHFEPLRHYAEVHLLLEPGEPGSGLVFETDCSEDVLDRNWQRLVLTHLREKEHVGVLTGSALADMKITLVAGRAHTKHTEGGDFRQATYRALRQGLMQAETVLLEPWYDFRLSLPAGVVGRAMNDIDRMKGTIAYSADGCIVGSAPVSAMQNYQREVTAYTAGEGKLSVALKGYFPCHNTEEVVAQIGYDAQSDLENTADSVFCAHGAGFIVPWDQVFSYMHLPPVPGQDKSGEEWYPGQWLPDAANFHAKTGEEEAWIGTEEIDRILDRTYNANKKDKDAGATNGYKKKRIIESSPVSASGGGKQKDAGVEYLLVDGYNVIFAWQELAELARVNMDSARGRLLDTLCNYQGIRRCELIVVFDAYRVEGHQTEACDYHNIHVVYTKEAETADAYIERFAHEHASRYRVTVATSDGLEQIIIRGAGCILLSAREFEQEVKEKNRQLQAEYDSRKDHGKVYLRDQMPSQVLDGSLEEQQMQSQNELRNLLQRIDHKSYPAYKDTRGSYDFGNYVLSIDHVQGDPFAAPSKVSVHVRGGAAKFPADLYRMKCRRLAVCDYLLRQFGRELERVSFKAKGSGKSGLLAVSRPGQEVLERTACQMDEAKGDLVLRFEVGFPANGRTVNARELEKIFFTFLPECVLHSLFYKALDEKAVYRAADLAEDQQYIRDHLKEQGLVAFVADASILPRESGVSGRPMKDAVKFTAPESMKVSFVLPHAGKIQGMGIKKGITLIVGGGYHGKSTLLKALELGVYNHIAGDGREYVITDDTAVKIRAEDGRSIKKVDISMFINDLPNGKDTSAFRTEDASGSTSQAANVVEAMEAGAETFLIDEDTSATNFMIRDELMQRVVNREDEPITPFIDRIRELYEQYGISTILVAGSSGSYFHVADCIVQMNRYKPQEITAFAKEEADRFPLPEVKPPKQAAPTFERAVRPDRAFKEDARMKLKTMGRDGISINRDTIDVRYVEQLADTEQLAALAYFLKYAELHVFNGKRTLRESVSLLMQYVEEHGLAAVTESSYVPCGLAMPRAQEIFACINRYRRISLMNIRQAKNEIKHTVEAYLKKDEAGDYEIPEIRQRPVLLMGPPGIGKTQIMEQIARELGVGLVAYTITHHTRQSAVGLPFIREEEFAGKTYSVTEYTMSEIIASVYRRIRDSGQREGILFIDEINCVSETLAPTMLQFLQCKTFGNQKIPEGWVIVAAGNPPEYNKSVRDFDMVTLDRVRYMTVEADYRVWKEYARAQHISGAILSYLELRPGNFYRVEADVDGMQFVTARGWEDLSNLMAVYEKLGFLVDEQVIREYIHHADVAEDVAAYLDLYRKYQDDYGIPQILDGCVRPEIYARIYAAAFDERLSVVHLLLDGLAAFFGRAASERALTDAWYAFLKEYRSQVETAADPAECYRTLVAEREQEMLRQIANDAYTREEAKREKLLMEKLKAAQQEVTKDSAQSCFEAAKVGFDRQREVLVQTEEAAGAALEHAFDFMEQAFENGEEMVVFVTELTITSESARFLSEHTCERYQTYNKQLLIGTRRAELLSELRRDNMRVKLLTFPVAEHRIFIIAGNRQKTVHVKWLQGVFPRSFLNFKRMYDADVLLLDEPTSNIDSLNEGMILRSLKQECADKTILMVSHRKSTMGIADDVLDEKMFYAHTISPIAVITSVVMTIFLGRIHPVFGVLALFFYVLVGAVIPVVSGRIGAAGGQEYREAFGALNTCVLDNLYGLEETLQYGQQEARIAKMAEQTGHLETVNGALKRGENLQRVITDGVILLAGVLTALVGGTLAENGSIPGSGAVIAVIALASSFGPTAELSALSNNLNHTLASGNRVLDILEEKPLVEEVTGKEETCGQNIHCAHVEASDAVLMKNAETKAKRIRENFWDTVNAPYEDRELALWMKIVFGFIWAISILNGIFYGVRASYLIALGIMVALLFGNIAVCRRHYRRWIDVVTFTLLSIPIFYVYYHASIGYFSVLFPMLFSCGIVFILGIRNSFVINLFYLAAMILCFRFDLNASAEDIYGENVALRFPYLYVCFVFMAYLLMYCIQHYWVEKRRRQEKLEQRVHEEKKKLQGMSMRVMNAMCRALGAKIPGEEEHCRQVAEYAKEIAKRLDLPEDMVSGAYQAGLLHEIGMIGIPDELIQRRNLTDEEYGVFQTYVKMGYDMISELQVADTIAEAVYYHRENYDGSGYLAGKRGSEIPVLAQILAVADYADRHLRWGESTEMVRGKIKERENTRFEPHCAAMMEQILKERNEDMKLFRGAVDTIKRVYRYEKTTGMDVGALQGVMLIFAVVLFLIDIENFRLGKYIIGIVTLAVGIVSVAAVFVIRRFRNVVLVCRIAVFLFLLLAAAILYAGANDGFSLLWYLLLPVITLVPLGMPFGAPVCIGFGLWIMAFFWTPLADILRYDYPRDYRVFYPIFYWGFCLMVVAMDIFYKNYQIRQQQNEENLENEVQEAVAGTKNLMIHSVTAISQLIDAKDRYTREHSQRVAEYSRLIADYMKGGHATGEELELIYRSGLLHDIGKIAVPDAVLNKPERLTDEEYEVMKKHTVWGREILSGLEFLPQADLGATYHHERYDGSGYPYGMHGEELPEMVRIISAADALDAMNSNRCYRKHCDRDYIIGEFRKGAGKQFDAGVAQAVVALIEEGRITVMWTQSVECSKLGKTWIITDVICGMVRNTGFCVQNLLPHVYLELLNICFMKTFDYTVKDELGIHARPAGLLVKEAKNFTSKITIKKGEKEVDATRVMAVMALGVKQGETVTVNVDGADEDAAVAAMKAFFEKELMICIEGKTAFSGIAIGPIREFAKKSSAVRRSHVDDTAAECTRFEEAKKVAMEELGALYDKAVKEVGEDNAAIFEVHQMMLDDEDYCDSIRNIITTQEVNAEFAVATTGDNFAAMFAGMDDEYMKARSADVKDISERLIAVLHHGSGAQSMEMEQAIILADDLAPSETIQLDRSKVLAFVTREGSTNSHTAILARTMNIPALVCTPVADGMDGKMAIVDGMAGKIIIEPEESVLAEYQKKKEDESKRKELLSALKGKPTATKSGKSIKLYANIGGIGDVGAALMNDAEGIGLFRSEFLYLQNDHYPTEEEQFSAYKSVAEMMGGRKVIIRTLDIGADKKIDYFNLDKEDNPALGYRAVRICLDRPEIFKTQLRALYRASAFGNIAIMVPMIISVWEVQKVKEIMAEIRAELDAQKIPYGKVEFGIMIETPAAVIIADELAKEVDFFSIGTNDLTQYTLAIDRQNAKLDMFYDSHHPAVLKMIQMVIDSAHKEGIWAGICGELGADTTLTEQFVAMGIDELSVSPAMVLPVRERVVGMEMKILLVCSAGMSTDILRGELIKYAKKEQLPLEVKAVGVHAYKEYCTGYDVILLGPQIAYRREKIAAECGNLPVLAIAPGDYAAGNAAHILEQVENTLRGLDEMDEIDETERQREAAMEIIAKAGAARSCAFAAIHRAKAFDFGGAAEQLDEAERYATEAHKVHTELLVREAGGQQTDGGLLVAHAQDHFMMATLAQELAEEIVDVYRALGETKGGSQMKGNREQIYEFVKLHSSVNANHGISTNEIAEALGMQRTNVSTALGELLREGRVKKSSSRPVLYSLTEAFADEEGAFRELVGYDGSLKYAVQLARAALLYPHRGLNVLLIGREGSGRKYMAEVMHKAAVQQGLVAEQAPFVMCDCMDFGADDAATIAELFGDGVQGGMLAEAATGILFLHKVQFLSVNVRRKLLRCFVEAEDARELPMIFLSCDDKALDVISLLEDHVLAEIRLPSLTERPLPERRKLLEHFLVAEACRTKRTITLESEVLTCLMLFPCEKEILTLKTQIRKACMNAYLRDYMDHGGELHLYISDFDPSVRKGFLNYRADKEAVDALVKPQMRYFYQEGGVTVLAPEMPPAEETQVSEPQIRTDEPSPVLLFVFYGQGVARALSDTIEEQLHRGNVYAVDIPYEQKDEQTYELLRQKLLAIDRGAGVLAVYDQKVLQQMLYTISCETGTQLRAVALPVTRFGMEWSKGAAIADGVDRVYRMAAESLGALWHSPKKVIVTLCTTSEGVALQMKQYLIQHKACTDAEVIALSLSDRNLLREKLLELMQGAVILCIIGTYDPDILAIPFLSAADVLAVPVERLPELLRTQRMEKAEVDFDEMFRCLGDHLEYVDIGRLKEALMELAEQIEGKYPMSLDTKTGLVMHIACAVNRIAGRGVSIENPHREEIVQKYHGVYRDLRKYVAPVERKFHMIFSDDEMANIISILMQIQEMKKKAFCMKMSIDEGYKIYTLCEIDSQKEKTYSKRIEEISDFLMEEYLIKNTTREQREQIVKDSLGYSELGCDDAMDGYDMYLPYIEGIKELREITMEYQAQYVRDMEREERGRCNLYMIIRHAAMEDLKAVTELEAKCFPAAEAAGREAFFDRLASFPDHFWLLYEDEKLVSMINGMATDEEHLTDAMYEHADMHSKDGAWQMIFGVATDPAEQGKGYAAALMRRVIADTKSQGKKGLVLTCKERLLSFYRQFGYRNEGVSGSEHGGAVWYEMRLTFMLYIGIDLGTSAVKLLLMDADGKIKKIASRTYDLSFPHPGWSEQNPADWYEQSIDGLKELLAECDKSRVAGISFGGQMHGLVALDERDEVIRPAILWNDGRTAEETDYLNQVIGKETLSGYTANIAFAGFTAPKILWMQKHEPDLWKRVKKIMLPKDYLAYRLSGTFCTDYSDASGMLLLDVEHRAWSEQMLEICHVEREQLPKLYESYEVVGTLKPEIAEELGLSPEVKIIAGAGDNAAAAVGTGTVGEGRCNLSLGTSGTLFISSEKFGVDAHNALHSFDHADGGYHLMGCMLSAASCNKWWMDEILKTTEYAREQEKIKNLGENRVFFLPYLMGERSPHNDPDARAMFLGMSMDTTREDMTQAVLEGVAFGLRDSLEVARSLGIRIERSKICGGGAKSPLWKKILAAVLNLKLDLIESEEGPGYGGAILAAVGCGEYESVQAACEKLVHVVDTVEPDPVLVEKYEARYQEFRKLYPAVKALFPFTMNKENMPEIKIGVVAVSRDCFPESLSVNRRKALMDAYTKKYGKDHIYECPICIVESEIHMVQALEDVKAAGCDALVVYLGNFGPEIAETLLAKHFDGPKMFIAAAEESGDSLLDGRGDAYCGMLNASYNLKLRNIRAYIPEYPVGTAEECADMIHEFEPIARAVVALSNLKIISFGPRPLNFLACNAPIKQLYNLGVEIEENSELDLFEAFHKHDGDERIPAVVAEMEAELGAGNKKPEVLAKLAQYELTLKDWVRDHKGYRKYVAIAGKCWPAFQTQFGFVPCYVNSRLTGQGIPVSCEVDIYGCLSEFIGTVVSEDAVTLLDINNSVPADMYEEEIEGKYPYTLKDTFMGFHCGNTTSGKLAFCEMRNQKIMARSLPVEVTNGTLEGDIMPGDITFFRLQSTADCELRAYIAHGEVLPVATRSFGSIGVFAIPEMGRFYRHVLIEKNFPHHGAVAFGHYGKALYEVFKYIGVPVEEIGYNQPAGVRYPTENPFAMTVSCYTLLIRYTYGKEHKQGGIMEIYSIKDEKFRRYGKVWSGFDCTRLIREMEHTPLPEDVIYVPSMEELEVLPEAGEFARRIYGGLPIQIGYCNGSNHRLNALEYHRNSEINIAVTNMVLLLGWLPDVTDAFTYDTSRVEAFFVPAGTVVEMYGTTLHYAPCNDGEEGFKCIVILPKGTNTEIDFALPKSGEDALMTAKNKWLIAHEEAGIRGAFNGLLGVNIEVMVLSVILKGKAENMEKREWRYSGTIEERTSIREQVHDVLARKVAEEAMVLLKNESLLPLPLDVPMALFGSGAKKTVKGGIGSGDVNNRKTISVYQGLLEAGAMITSEAWLCDYEKRYEQAREEWKKLVLEETKRVENPFDAYSNHPFCFPEGRAVTEQDIAGAGVAVYVLSRISGEGSDRRKERGDYELSRREQEDLLFLNEKKIPVVLLLNTGGPVELTDILEQAKNIRAVLNISQPGQAGGYAVADILFGKAVPSGKLTATWARHYGEYPSADTYGYRNGDLEKEEYREEIFVGYRHFDRENLPVLFPFGYGLSYTSFLIRQRSVREETNSLELAVSVQNTGGTYAGKETVQVYATLPQTGMEKEKKRLVGFAKTKCLLPGEIQQLEIKIPKNMLASFSEEQSAWYLEAGTYGIWIGADSQKLEQAWEFDVYERTLTEHTCRLEAAESDAGKLSAAEEQKVHLTGKIPAEELIPLLYGHVEQNSSTLGAAGIRVPGSAGETTHALEQPYGIRSLIMADGPAGIRLHQSYEVDADSGKVYGKSVLGALENGYLEPMQKHENAKTYYQFCTAFPVGTAMAQTWNEELLQSFGRAVSHEMKEFHIDLWLAPGMNIQRNPLCGRNFEYYSEDPFLSGKMAAAVVRGVQEEGTCGAVIKHFACNNQEDNRMGVDVHISERALREIYLRGFEIAVKESAPVAIMTSYNRVNGVHAANSRALCTVIAREEWGFDGVLMSDWSTTAPEDGSIPWKCIEAGNDLIMPGSEKDDADIRQAYADGRLSEKEIRLCAGRIISLINKLDKKTKKMKSKSGNSLRSVLAHIVLIVLSFMCLFFFYILIINATRSHAELQKGFSALPGTHLLENLKNVANDGSFPMFRGIINSICISTACAGLCTYFSALTAYGLYAYEFKTRKIAFTFIMAILVMPTQVTAMGFLRLITKMGLYDTWYPLIIPSIASPAVFYFMYSYLQSSLPLSLVEAARIDGSGEFRTFNCIVLPIMKPALAVQAIFTFVGSWNNYFVPALILQTKSKMTVPILIATLRGADYMNFDMGKVYMMITVAIVPIIVVYLLLSKYIIAGVTLGGVKEMKKKKKSISYGKWGQIFILPFFIIYFIFSLIPLADTVRYSFYEYYRSGIKEVGPNFVGMANYISLLKSDMLAYGKNTLILWLIGFIPQIVIALVLASWFTDARLKIHHKQFFKVVIYLPNLIMASAFALLFFTLFSTSGPVNSILMSLGWINSPIDFMGSVFGTRSLIGLMNFLMWFGNTTIMLMAAIMGISVEVFEACEIDGCNSLQRFFYITLPMIRPILAYTLITSIIGGLQMFDVPQILTNGQGNPDRTSMTLIMFLNNHLKSKNYGMAGALSVYLFIISAILCFIVYKMTNDNDPDGSKAAAKKAAREERRRRRMKQRVISLMLTVAMGATLLAGCGSSATDSANAGADSGKESAAAAGTESDEKDFSGEGKVINIYSWNDEFRTRLEAVYPEVESTSSDGTVTTLKDGTEIHWVINPNQDGVYQQKLDEALMNQADAAADDKVDIFLSETDYVFKYTDKDADVAMPLTDLGIDPETDLADQYDFTRTTASDSDGVQRGSTWQCCPGLLVYRRDIAKDVFGTDDPEAVGEKVKDWATIKDTAAELKAKGYYTFASYADTFRLYGNSIDESWVQPGDTTVKVDQKIINWVNDSKEWLDAGYLDSNIKGQWNDDWNKSMGSQSKVFAFLLPAWGIDFVLNPNWDGEAGNWAVTNPPQEYNWGGSYIHAATGTDNVKYAKDIILAMTSNQDNLLKISQDYSDFTNTKSGMAEAAKDDADFSSEFLGGQNPFVYFAPVAENIKIAPLSAYDQGCVELIQNSFSDYLQGNVDFDKAKANFETAIKERYPDITEVQWPEMAFSEEWYETELKSSELETLHRPPTVEYSFYTAVKTGDMETVVANCKEDAFIHLEGTGVLSRNALTNIKYHFVVTAAMLTRYCIDGGLEPEQAYRLSDFYILKMDTCTTVRQIADLHHEMAKDFTGKMVLQKKSSILSKPVVQCVDYIYSHIKERITVAMLAEYTGLSESYLSRVFKQNLGISISDYIREKKIEKATHLLRYSDKSIIDIANYLSFSSQSHFIQTFENFTGMTPKKYRNKYYKSMWMPECRKFRDKQMAQILIAKSGISNHTAAGICYDPCLSKFGALHGLWLQASRQFMLQTDKITALYCRLSQEDMQAGESESIQNQKLILQKYADEHHFFNTRFFVDDGFSGVSFEREGLQAMLHEVEAGNVATVITKDLSRLGRNYLKTGELIEIVFPEYEVRYIAINDGVDTAREDNEFTPLRNWFNEFYARDTSKKIRAVKQAKAQKGERVNGEAPYGYLIDPDNRNHLIPDPETAHVVKQIFAMYVRGDRMCEIQNWLRDNEILTVGELRYRRTGSKRHPRPQLNAWYNWPDKTLYDILTRKEYLGHTITGKTYKVSYKSKKTKKNPEEKRYFFPNTHEPLIDEETFELAQKRIATRQRPTKVDEIDLFSGLLFCGDCGYKMYAVRGAGTLERKHAYTCGNYRNRARNDMLCTTHYIRKSVLKELVLADLQRVTSYVKEHEQEFIETANECSAKAVQKTLTQQRKELDKAQNRINELNILFRKLYEDNALGKLSDEQFAFLTSGYDEEKKTLTRRIAELSQEIDNATERSADVKRFVALVRRYTAIEELTYENVHEFIDRILIHELDKETNTRKIEIFYSFVGRVDTGDKPTESISYFRQIGADVKSYAIMTQNQTPVTTTEHKIGKVTYLVCSSASERATDTLDKKIKKLIRKDMELNPANARKMNGTNGNEPGYPEKALVPYPVILAATKGDPDAMKIVLQHFSGYIARLSMRKLYDERGNVYFGVDHDIRERLQAKLMMAVLTFKAEEMEPNRREFIKQCAFQKFCNTVLHNEACDAHKELHRHKAREITFSDLTLEEARQLHTFDEYFKGEIAFERAGKKITPKLLLEAIRTLPEEKRKAVLLYYFEGMNDTEIAELFDTSRSTIQYRRTSSFELLKKYLEENADEWDEWMKKTPKIFGFFSKNFLSSKIRLSEKPGQTYRYCKRYSDDMKHLPKSTLTEILNDPYGFTYKEMSEVIGEDKARALYAELYKQPFHKKNLSISTKKVYKSSDTEKYVYELKDNRYIETVFIKRRDGGTVCVSTQVGCSVGCIFCESGRNGFVRNLTPSEIVQQVILIRQKVNRIVFMGMGEPLFNYDNLIAAIHILRDRNGLNFPTDGITVSTVGPVNQLKKLREEHLKIQLTISLHAATQAARNCIIPHMHMYAIEDVVKQALSYSQRHNRKVVFAYLLLPGINDRSSDIRQLAKWFKGKNVMINVLQYNPTSNSKIRAPQKQEMVAFKHQLEQTGLEVTMRVSHGREIKAACGQLANTYNKAKKQQKMLEKYWIKCPICNGKTRVQVFYNTVLRNFPLFCPKCKLTHIIDVEKLEIIIKNSEKQKEGYMAKRPVPKYDFKAFGAAIKAARTGRKESRKKVSDEMFISPRYLANIENKGQHPSLQIFFELMLRYNISVDQFLLETPPEKNTQRRQLDALLDGMSDTGIRIVSATAKEIAEVETEGRMNGRKRTVQIKFRVTEAERDLILEKMKLVPTRNMAAYLRKIAIDGYIIQIDHADIKAMTAEIQKIGVNVNQIARRVNATGNAYQEDIEEIKGVLAEIWRLQRLSLLKALMAVTKIKPIKSTLSKALDYIENPDKTDGKMLVSSFGCSYETADIEFEYTLSQALQKGNNLAFHLIQSFEPGEVDYQKAHEIGKQLADAVTKGQHEYVLTTHIDKGHVHNHIIFCAVNFVDHRKYNSNKRSYYGIRNMSDKLCRENGLSVVVPGKGSKGKSYAEYQAEKTGTSWKGKLKIAVDALIPQVSSFEELLQRLQAAGYEIKPGKYVSCRAPGQERFTRLKTLGADYTEEAIRERIAGRRAKAAKAPREQRGVSLLIDIENSIKAAQSKGYEQWAKIHNLKQAAKTMNFLTEHKIEQYADLVSRIEEMAAESGQAADALKDAEKRLADMAVLIKNVSTYQKTKPVYDAYRKARNREKYRAGQEQAIILHEAAARSLKAAGIAKLPNLAALQSEYEALQAQKEALYADYGKLKKKVREYDIIKQNIDSILQADRQPEREKGTERGMENQKMPEYETIRAAVAGEKWAVEKVVECYKDEIDRLSTVAVRQPDGSTKQEINEDMRQSITKKLIEALPQFPLEEMEKGNVRMNGVKRLTPPQSRKVNALVRRTCCNYDNGNCILLDDGDECVCPQLISYSLLCKWFRVAVLPADRLLYAELYQTGDKKKCTECGAFFASTSNSVKYCPVCRKRITRRQAAERMRKRRAPVTQMIRLTVEETNLLSIYNEGGKRALIENVNAALPYMDADMRELAKRTLSKVDALTEAEFAELPIYAADEVMPEQSKFENMDLFASLEAIMKQNTGFYQSDLDIDKEIIAKAAASPHREDKTLLWFCRPSGTHCFRERDVFLKDTAPHNTWRFYMEQTSDRVLAYAIELTGKERGKIKGNLYELDYSKHYERVKEKELPADTVKLIYEHGERVQEAGRYFDGTPDPQLGKFERFEAVPNDPDALQSLLQEERRSREQLSPGDFKAHIAALRDGLIETEARRIVREMKRHYEPNSPNKTHFMAELSPAFMRLAATKDTDRLFSMLPYKTLSFSKIEGRHGTYALIDKGENRDREIRKPRPSIRAQLKADKAKTAPKKAAAKTKNHDMEVMASLRDTVKDYQDELRDGIAWVAFWKQGRSWNAEYFHLDMDDTLYPEDRSRLEEIKSIDPAAVILNGYYCGHLGEDMSLDELTAGVRYHYENSMNDIDGFIGAHDDRLPPEVIEEARAAAHEAGLPFSEKPYRDGEDFNPYVFDGSMSIEDFELMHRMIEKERSEQMAEPILSGYLSNLGKYTEGRPAGEWVTFPTTAEHLKEVFDRIGIDFKHYEEWHFTEFQSTIPGLTEHLSEYSHPDELNYLGKLLEMQFDDDREKFIAAIEYGDHADSLQDIINLAQNLDCYWIYPSVHNEEEYGRYLVDELEEPELPEEAKKYFMYEEYGRDASINDDGMFTEKGYIYNNRNTFTEWYDGRDVPEEYRVTPQPPQPERPDPSKVEMDAAAPGQRTAQTAEQPQEPRPVIPIVLTSEKPAEKLKEITDRLEQGIAELFDSERYREYLKVMSKFHNYSFRNTVLIAMQKPDASLVAGFSAWKNNFERNVMKGQKGIKIIAPSPYKIKQEMQKIDPHTQKPVIGKDGKPVTEEKEVTIPAYKVVSVFDVSQTEGKELPDIAVDELTGDVDRYKDFFAALEKTSPVPIAFENIEGGSHGYYHLEDKRIAINEGMSELQTLKTAIHEIAHAKLHDIDLNAPKDEQQPHVDRRTREVEAESVAYTVCQHYGLDTSDYSFGYVAGWSSGRELSELKSSLETIRSAAAEIINSIDENLAELQKAQDKEQTAGQEQPTREGQEAAPEKPDPEAAAPGKSGAQEKAGAAPKEAFTPETIYRVRRNPYSDSRENSYLLQAYVTQENGRAKMGDVLYTGTPEKCRELMGQLKSGELTEGDVKQLYAKAQETAQTAGQDKDTFSIYQIKGGDETRDFRFEPYDRLQAAGNVVDRANYELVYSAPLAPETSLEDIYTCFNIDHPKDFKGHSLSVSDVVVLHQDGQDAAHFVDSVGFREVPEFLQEQKQLTPDDLETGETVKTPRGTFHVTAMSREQIEAAGYGFHHQSDDGKYLIMGNGTRAFAVAAEQAQRDNPLKTAEQTTEQNGNMIDGIINNTPTVDELEAKVKAGEQISLVDLANAVKADKERGKGAKPEKKPSIRAQLRADKEKAQKKNAKQKSQDLERSMKLIIAEKPSVAQTIAAALGVKEKKDGYIEGGGCLISWCVGHLVQLAEAAAYGEQYKKWSFESLPILPEEWQYAVDPDKGKQFKTLKELMHRADVSEVVNACDAGREGELIFRFVYEAAGCKKPMRRLWISSMEDGAIKAGFASLKDGQEYDALFASALCRAKADWLIGINATRLFSCLYGKTLNVGRVQTPTLKMLTDRDAAISHFQKEKYYHVRLDLSGAEAASGRISDKAEADALKGACEAETAVCVSLTREKKTAAPPKLFDLTSLQREANRIFGYTAKQTLDLAQSLYEKRLLTYPRTDSSFLTDDMGGTAAGIIALLCEKLPFMAGADFTPEVVKVLDSKKVSDHHAIIPTMELAKADPDALPESEKNILTLAGARLLFATAEPHIYEAVTAVFSCAGTDFTARGKTVLAEGWKELQRRYRATLKDKPEAEDGENADVTLPKLSEGQGFPNPAAKVTEHTTTPPKPHSEASLLSAMERAGNGDTDPDAERRGLGTPATRAAVIEKLVKGGFAERKGKQLIPTKNGNSLICILPDILTSPQLTAEWENNLTQIAKGAADPGEFLSGIEAMARELVQTHAAALDGKKDLFREEKPSVGKCPRCGSPVHEGKKNYYCSNKECAFVMWKNDRFFEERKTAFSAKIAAALLKSGKANVKKLYSPKTGKTYDGTIVLADTGGKYVNYRIEVQKNMKSIHTFDVFAPTDEQEEAMNKKRGGHYRRGKNKEMDYFIECATSLFPNNHYSRFTPIYDTTKEFYQLITSSDTTERAILNWIASNRAWNYLFGLLRHYYRTGHHDDNYIFPEFKIGSAYVADYLLIGNSSDGYQFVFVELEAPNGRITKEKGTRFGEVINKGIEQVRDWQMYIAANWNVIVAELEKHSFSNTKLPRQLYKYCPYQIYYAVIAGLRKDFENIRDRKLQLQNENNITLLHYENLIDVANENMTLFTDNPFEKMMIQRPGGRRDNAPPVPHSPACASCPYKGQLPCVGYCLKQVQEKKASEPERMNKKILRTLTALCAALMLSGGFSVTAFAQTPEGEDDTNDSGVVYEEPQKEEPLTPDGNATLVDDFGGNKQLITVTTKNGNYFYILIDRDDEGENTVHFLNQVDEADLLALMEDGSTEAAPPAVCSCTEKCEAGKVNVSCPVCKDNMTACSGKEAEPETEEPPELPKEKGNAGGLVLFLVVALLGGGGAFYYFKFMKPKQNVKGGTDLEDFDFDDYDEDEPDEGDGLSDEEQEDEEAMAMNKIERIDKEIAKTREKITEYQNKLRGLEAQKTEAENLQIVQLVRSMRLSPHELSAMLSGGGIPGMEAAPGYPAEPADHDTEEMEDTENEMTREGAVEVNAATGKKKRISKRIRDADFAKTEAPQPPEQAAQTIPGGAAPAPTAAAPPLPHAPGAEREQDTAAAERVLERIDGARTRKASKKAARKAQAEATAKEKSSRLQFTDEERATPELERYIRKSDKAADRLDAAKAAIPKEKKLVRERTFDEATGKGKTRLHFEEQEKPIGRNKPHNNPLSRPAQEAGIFVHNKIHSVEKDNSGVEGAHKSEELAERGAKYGTRKVKEGYRSHKLKPYRAAAKAEKAAFKANVDFQYHKSLHDNPQIAGNPLSRFMQKQQIKRQYAKSARKGGAKTAQKAAENTRKAAKKTAEETKKAIAFVGRHPAGVCIAVAALLLFIMVSAGLSSCGSMFSGLMNGILGTSYTSEDSDLVATENNYAAKENELQQQIDNIESTHPGYDEYRYDLDSIGHNPHELASYLTALLQTYTPQSAQAELNRVFAMQYTLTLTEETEIRYRTETSTDPETGETTSEEVPYEYHILNVKLTNKPISEIAEELLTPQQLEMYRVYLETSGNKPLIFGGGSPDMGASEDLSGVQLVNGTRPGNTAVVDLAKRQVGNVGGRPFWSWYGFNSRVEWCACFVSWCYNQAGKSEPRFAGCQSQGVPWFQSRGQWGARGYENIAPGDAIFFDWDGDGSADHVGLVIGTDGERVYTVEGNSGDACKIKSYPVNYSCIKGYGLMNWNMNGLKTDTIINRDALYALRELPEESVHCCVTSPPYYALRDYGLDMQIGREDTPEQYIDRLTEVFRELRRVLRSDGTLWLNIADTYCGTGNKGYHADPKNPKGRNGQQIAKNNRVSGCKQKDLIGIPWLLAFALRADGWYLRSDIIWQKENPMPESVKDRPTRCYEHIFLLTKSKKYFYDAAAIAEPLAPTTAARYRTGRSAGQKYADEVPGQGKVQGLNRARSGSYYDEALMPTMRNRRDVWLINTVPYKGGHFAAFPPKLAETCIKAGCPKGGVVLDPFFGSGTTGAAARQLDRHYIGIEINAEYCALARARIGGTEKMQKETRRNSAAGSTKPNPPRKLTRAEKKQIAEIIRQAKGDGKAHTAQQTIPYIQMYPDGICKVTGRKYSKTVAFEDINYQLAQADDKTAIFENWCDFLNYFDASVSVQLSFINQGTQRGEAEKAVNIPAQEDAFNSIRTEYRDMLKNQLAKGNNGLVKAKYITFAIEADSLGAAKSRLARIETDVLNNFKLLGVSARPMTGYERLKMLHGIFHPEGGQFAFDFSWLAPSGLSTKDFIAPSSFRFGEGRYFRMGRKIGAVSFLEILAPELNDRILSDILDLETGVIVNLHIHSIDQTEAIKTIKRKITDLDKMKIEEQKKAVRSGYDMDIIPSDLATFGSEAKNLLQDLQSRNERMFLLTFLVVNMADTKRKLENDVFAAAGIAQKNNCALTRLDYQQEAGLMSSVPLGENLIPIQRGLTTSSTAIFIPFITQELFQTGAALYYGLNALSNNMILCDRKQLKNPNGLILGTPGSGKSFAAKREMTNAFLITDDDIIICDPEAEYFSLVQRLDGQVIRLSPTGKGIDGKPQYVNPMDINLNYSEDDSPLALKSDFILSLCELVIGGKEGLQPVDKTVIDRAVRNVYRPFLADPDPEKMPILGDLYNELLKQPEPEAARIAAALELYVSGSLNVFNHRTNVELNNRLVCFDIKQLGKQLKKLGMLIVQDQVWNRVTVNRAERKSTRYFMDEFHLLLKEEQTAAYSVEIWKRFRKWGGIPTAITQNVKDLLASREVENIFENSDFVLMLNQAAGDRAILAKQLNISPQQMKYVTHTEAGEGLIFYGNVVLPFVDRFPKDTELYRVMTTKPEEVGEAMAYVPVPKDLSKVKTKVAFNLTKRQIVCFAAALLFGLPLFFLLKDSTGTSLASMAMIAVMLPCFLFAMYEKHGQPLEVVVKNIIRTKFIAPKERPYRTDNFYSVLERQRKLEKEVSAIAKGNTKKQRGGKHKAMQSILDAINEWIKEILIGAINGNLSTMFGDVNEKVGTIAAEVGQTPQGWNANIFSMIQTLSENVIVPIAGLVITYVLCYELISMVTEKNNMHDVDTSMFFKWVFKAFVAVYLVTHTFDITMAVFDMAQHVVSGAAGVIGGSTEIDVAAALASMQSGLDAMEIPELLLLVMETSLVSLCMKIMSVLITVILYGRMIEIYLYCSVSPIPFATMTNREWGQIGNNYLKSLFAIGFQGFLIMICVGIYAVLVNNMIIADNLHSAIFSLAAYTVILCFSLFKSGALAKSIFSAHMAMMNEMEYRTIGSALAGGYRAAVYCRLSKDDDLQGESASIANQRDMLEKYCEKQGWEVVAVYQDDGFTGLNMERPDLQRMLRAIERRQINLVITKDLSRLGRNYLQTGHLIEDFFPRNGVRYIAMNDGIDTLRDNNDIAPFKNILNEMYSKDISKKVHSSYLLKAQKGQFTGCLAPFGYRKDPEDKNHLLIDEETAPIVRLIFGYALNGHGPNYIRRRLEEEKIPCPTWWNRERGLRNTRTKWEKKDPENGRYMWDFSVIKDLLMNPVYTGAIASQKKDYRFKIGTIGEKKPEDWIVVEGQHEPLIDRMSFDIVQNKLKSRQRPGQTNEISLFAGLIKCGECGKSLTVRYTNAKHPQQIYSCKTYNAFGKNHCTQHRIDYDTLYSHVLRKIRECARAALMDGKAVADRLTNTCEAEQREQREAMERSLTRDEERIEVLDKMVMRLYEDMIAGRISEQNFNTMLEKTQTEQTELKTKVSEGRKRLSDEVQLANDAKQWVEAIQEYANITELDAATLNRLIKEIVVHERIDEDKTRHISIEIHFNLKPIPEVEQVTAMAKNKTEIHVTTVFDGELDATDVFVSLISQKYGKTNAKEYLAKKKDLKYNEDEVQKSQIPSGLCGMQPPQSIEEIKEGLETTEKGGVRQSIRNCLTVFQRDPLLSGAIAYNILTDRKDIIKPIGFHRESTALNDTDMKYLLLYLEETYGLTNEKKIDNAIGIVANENKYHPIRDYLSSLVWDGTERIRFCLRHFLGADADDYTYEALKLFLLGAISRAFQPGCKFEIMLCLVGGQGAGKSTFFRLLAVRDEWFSDDLRKLDDDNVYRKLQGHWMIEMSEMMATANAKSIEEIKSFLSRQKEVYKIPYETHPADRPRQCVFGGTSNALDFLPLDRSGNRRFIPVMVYPEQAEVHILEDEAASRAYIEQMWAEAMEIYRSGRFKLAFSPAMQRYLKEHQRDFMPEDTKAGMIQAYLDKYTGSMVCSKQLYKEALNHAFDEPKQWEIREINEIMNQCISGWRYFPNPRMFSXXXXGSVKTRQRTPATRLKKRWTVLWRSQNRWSFHSENDSPLHPLLLSRCRAGCRGKSRNYRLFSPMTTKTTEKMNVFEAVKQSVTTRQAAEHYGIHVGRNGMACCPFHNDKTPSMKLDRRYHCFGCGADGDVIDFAAALYGLRKKEAAVQLAQDFGLSYEDWKPPGKEKKPKPRQKSPEEQFQEAKNRCFRILADYLHLLRAWRTDYAPHSPEEAFHPRFIEALQKQDQVEYLLDVLLFGETEEKAALITDYGKDVIQLEQRMAELAAADAARTKKHHERHAATPEHKDWTRAGQNRGTSQDLKAVSEALSYLRQKGLSTVEDLEVFLESSGKSAADYRSQMKPKEARSKVIDGILASRTDCKECKPVYEKYQKIFFKKTKEKFKQEHPEVARYAKAAAYLAKHPDDKDSTQKELQQEQEKLLSEIAELKVPLTEVQEDLKKLRDIRYWVQKATPGTEESKEPPKKQPIKEVLQDKADEKKAQRTAQEQTKHRQQDMELENFIIDEEAAPVVKQIYNFCLAGNGPTKIARMLTEQQILTPGTLEYRRTGSTRRYHPGYECKWATNTVKENEGKSKKQAKIAGLNKFLQIYYARVMEIYKNIVKKRKHELSFYLNDRGRVTYNELCRKCQHGCKQSFRAVVIDCPRYLSKRAKKKEEHTEGWVKSDAFHGSLNNAVYTFGAEDGATDVLTASWTANSYTLHFDPNGGAEVTHIEDMVIQYDEEITLPDATAAYVKYTFDGQNVTQDVLSGAIRLESDGDSEAADPE

SEQ ID NO: 6 - protein, 861640 aa, Dorea longicatena (residues 1-287,214 of 861,640)
  misc_feature (294178)..(294225): Xaa can be any naturally occurring amino acid
  misc_feature (448755)..(448787): Xaa can be any naturally occurring amino acid
  misc_feature (492191)..(492242): Xaa can be any naturally occurring amino acid
  MISC_FEATURE (496529)..(496529): Selenocysteine
  MISC_FEATURE (500661)..(500661): Selenocysteine
  misc_feature (520680)..(520743): Xaa can be any naturally occurring amino acid
  MISC_FEATURE (532995)..(532995): Selenocysteine
  MISC_FEATURE (533543)..(533543): Selenocysteine
  misc_feature (586556)..(586616): Xaa can be any naturally occurring amino acid
  misc_feature (593447)..(593487): Xaa can be any naturally occurring amino acid
  misc_feature (633079)..(633129): Xaa can be any naturally occurring amino acid
  misc_feature (647602)..(647650): Xaa can be any naturally occurring amino acid
  misc_feature (676167)..(676194): Xaa can be any naturally occurring amino acid
  misc_feature (681343)..(681346): Xaa can be any naturally occurring amino acid
  misc_feature (686227)..(686260): Xaa can be any naturally occurring amino acid
  misc_feature (698382)..(698432): Xaa can be any naturally occurring amino acid
  misc_feature (700353)..(700356): Xaa can be any naturally occurring amino acid
  misc_feature (715366)..(715415): Xaa can be any naturally occurring amino acid
  misc_feature (728542)..(728598): Xaa can be any naturally occurring amino acid
  misc_feature (744213)..(744216): Xaa can be any naturally occurring amino acid
  misc_feature (818913)..(818916): Xaa can be any naturally occurring amino acid
  misc_feature (838815)..(838843): Xaa can be any naturally occurring amino acid
  misc_feature (839903)..(839955): Xaa can be any naturally occurring amino acid
  misc_feature (855487)..(855522): Xaa can be any naturally occurring amino acid
  misc_feature (860194)..(860197): Xaa can be any naturally occurring amino acid
  misc_feature (860446)..(860449): Xaa can be any naturally occurring amino acid
  misc_feature (860529)..(860582): Xaa can be any naturally occurring amino acid
MKAAPRVVKVSGLSQEKIKTQASMQKQQVEKSLQAMQKARVVQMARKSAQASAESGKAVFQVTGKGSKLSVQGITAAIQKGVVALEKMGKWIMNKRNIKKIIVLVIIGIIFINIYGPVAFMRDGIITRQRVNSFDELYDLGSARRHECIKGEHIYIIYFDMRIPRVKKEIIYQKNGEIQKKVVDVDVQRVVPGFYYVSWDTKCNVYRIETIKKYYLVIPYCMKKNIIQKMVISFAILCMLFMIKNNVFAYNNENNVMYEPQKIPAEFDSNISFQMIEEEIQNYIEINNLNIQIGTEEYLDLMYSILYGEVDNITQNTERYFAAYASMYVVNVQENDTDNMLNLESINESTSDLNCTISDMQKKNQEFKNLLNTKNNEYKSKSAKASGRYNISKAQEYAKTYAKTWNYVYGKYSSDCTNFASQIVHNAGMPLVVGEWQWNGNSIAKRTWNVAHTFTEYWSITRGYNGGGYTNRRDTNKNANPGDFIAYMNVDTYEIWHVAFVQSKSSDGAIYITQHTTDRYNEKWNSIPINHTSDYIIIKFSMCGLYNIFYVMSILLFIDFFIIPFIDYYSLFIIKNNHFLFVIYNGMIIFFDWDHDGTSDHVGIVEKCEGGRVYTIEGNSSDQVRQRNYAVDYGAIMGYGRSWGILADNVPRGTEYKKVRVLGRIDNLEIVLPENKLDEIVITLGLAEYHKLERIVKMCEKSGVHTKFIPDYNNVIPTKPYTEDLQGLPVINIRRVPLSDPLNKWMKRGVDIFGAIVAIILFSPVMIVTAIMIKKTSPGPLIFSQERVGLQNRPFKMYKFRSMIVQDEKKEKKGWTTKDDPRVTTVGRFIRKTSIDELPQLFNVLRGDMSLVGPRPERPQFVEKFKEEIPRYMIKHQVRPGLTGWAQVNGYRGDTSIKKRIEHDLYYIENWTLGFDFKIIFLTFFKGFINKNAYMSKRNKKRLTRRQQEIRRKRLKKRRRRRRLVIILELIILCILGTTAFGLFKLGKMERTNLSNIKNNGLKQTGYTNVALFGLDSREKNLGKGNRTDTIMIASINNETKKVKLVSVYRDTMLKQNGEHYDKANAAYSVGGPETAVNMLNENLDLNIQDYVSVNFLALADVIDMVDGITVKLTDEEVVHMNNYCVETSKVTGKKYKKIEPAVAGTYKLNGVQAVSYARIRYTAGGDYKRTERQRLVLKKTADKLKQQDLATLNKIIDKVMPEVSTSFTTKEILSLATGAFDYELGETTGFPFDLETPEQIPGYSGSYVIPKGLEENVIKLHQFLYPNKDYTPTATVTDISNTLNDMTNVYPNTTESGTSQNEMNKKKVDVVIPVYHPGSEFKKLMERLERQTYEVNRIFLMHTTDGQSLESMKERYKNVTVEEITPDEFDHAATRDKGIRQSDADIVICMTQDACPDNEYLVSELVQALEEANVAVAYARQLPRKESTLLERYTRQFNYPPESKVKSSKDLERMGIKTFFCSDVCAAYNRDMYLKNGGFEKKAIFNEDMIYAAKVIENEQKVYYNAKARVIHSHNYNFAQQFHRNFDMAVSQAQHPEIFRKVSSEKEGMKLIKNTVAFLIKQRRPWLVFKLFTDCVAKYAGYLLGRKYQKLPKKIVLKCTMNPRYWTMARNTGKKVRRRGRRRKRGFATWSIGKKIGAVLGGTLLGVVVIGSVILASKMNKLSSVKLDTDKLNISDEVKHEKGYTNVALFGLDSRENDLGKGNRSDTIIIASLNNDTKEVKLVSIYRDTLLELDDGSYNKANSAYSFGGPEGAVSLINRNLDMNIEKYVTVNFNALVDVIDAVGGLDLELTHDEVVHMNNYCVETSKVTGKSYEKIEPEVEGTYHLNGVQAVSYSRIRYTEGGDFKRAERQRLVLQKIADKAQNMSVGTVNKIIDSVFPQISTNFTLAEIIGYAKNLTKYKLGDSIGFPAENTTDMLNEVGSVVIPKTLSSNVLEVHKFLFGSDGYSVSSTIEGIESGITAKASDKAKSGTTIEDDETPGSKGYSENYSNNSSGTGTTRSTYGTTGGSTYGTGYSGGTSTGSGTTGSTGSTSSGTTGTTGGTEGTTTGGGTTGDNAGSTSGTTGSTEGTEMRRIKKIFVTFLAICMICPCLSVITEAATAELRFADPSTTVGAEVDVKTKLTSASSMQSMEATLTYDKSELRFISGDNATGKDGTIKISWTGSGTTAEFNLKFQALKEGTSNIEVSSATGTAEDGTNLEVTQGSSAVTIGAGDPSLIKEETSTEDTTTSTADGAVVKVNGKKYVVTSDFSEEIIPEGFKKGELTFEGSKYSVITQEASGINAMYLTEKDSDDADFYMYNSDDGSFAPFEEVEIAKDRYIIPLMNDGKVNLPSQYQKTTLTLNGKEFDTWQDTKDAEYYIIYALNSDGEKTTYRYDTTDGTYQKYTPESTGSSSSESKLSNGKGIWGKILNFVENFLDIVVIIAIALILLLVLVLIVTAVKLRHRDLELDDLYDEYGIDLDEEEEALKAKKKEEKQEKKAQKASKQVSKKAAKKYDDEDEFEGYDEDDLWVKENIAKAMEKPKKQKSVKHATAKKAAAKGVRSLDETGPAIRKPVKNINLQDTDDFEKFTPLDEEEFDNFEGYYSDDDYDMFGSNDYDYDDDELFDATADLLSNHPEKKRSHAEMDDTFKMDVIDLDMSFQEEGKAPVGNASFDELKKYHAYYARNTDQKVIYLTFDCGYENGNTPSILAALKKHHVPATFFVVGNFLQDNPDLIKQMQKEGHTVGNHTYHHPDMSQIATQETFSKELSDVEDLFKKITGKSMTRFYRPPQGKYNTENLQMAKDMGYHTFFWSLAYVDWLTDAQPSKEEAFDKLLGRIHPGAIVLLHNTSKTNGEILDELLNKWESMGYQFSSLKDLLKTEEMRLAGVKVVSLAGKIRAINPPAKKQKEKKKRRINGLYLEMSFGYMESEHRNSGKLFIQLYDAIRKKMCGKGHKLAKNREMAREYVKKDNMLSKEIRYKKTEKGMMITEYYGNDSYVVLPDEIEGEPVTILGDYAFSRNLSVEEIWMPLELKEVGRYAFYRCRNLRKLVLGNRLLDMGGGALTGCHLEEVEIYLQDGKKSCLKSIVEEMRYQMRIYLHAPEGGQEAKLLFPEHYEEAVENTPARILETHHHGAGGYYRQCFYDHELDYRKYDEMFYHTVAEDTEETAVELALNRLRFPAELSDKNRQGYEEYLKKHMTAVAKWTVKQEEVEGIRFLQRRKLWTEQSLQAGMDFAAEGSKTEILSIFMDIRKDQFPKKKKTFELMDREKIENNRGTIEKDRLENISRKILVMARNELYMKMRFLDVALSSLPFVLDTGAEGMGTDGLYLYYDPQYLGGLFREDRVMVNRIYLHLVLHGIFRHMIRRKGREERLYHLSCDIAVESIIDELQYRCVMKARSFPRREMYRELKKEMKTLTAERIYEVLRKKALTQKQLEQLEVDFRVDDHSYWPKAEEKKRQNQIENRWQDISERMETEMETFSKEASQTSGNLIDQVKVENRERMDYREFLRKFSVLKEEMTVDPDSFDYTFYSYGLTMYGNMPLIEPQEWKEVQKVEEFVIVIDTSMSCSGELVKKFLEETYGVLSENDSFFRKVNIHIIQCDDQVQTDQKITCEEELKEYMDKLELKGEGGTDFRPAFSYVDELVRQHTFEHLRGMIYFTDGRGIYPAKRPVYETAFVFMEEDYEDVDVPPWAIKIILEEDLDFMDIKRAKKEIKDSIEAYLAKDEYGDYMIPSIRQRPILLMGPPGIGKTQVMEQVAKECKVALVSYTITHHTRQSAVGLPFIEKKMYDGKEYSVTEYTMSEIIASVYDKMEETGLREGILFIDEINCVSETLAPTMLQFLQCKTFGNQKIPTGWIIVAAGNPPEYNKSVRDFDVVTLDRIKKIDVDVNYDVWKEYAYRADIHPAILAYLEIRRDYFYRMETTVDGKVFATARGWEDLSQLLKTYEKLGKKTDREVVHQYIQHWKIAKDFANYLELYHKYKKDYGLEKIIEGVYTRDTLERLRYAAFDERFSVVNMLIGRLGSCFKEYFLKDRLVTMIYEYLKLYKSNLQMDLVVCEAREQYEKLRKEEQMTKQDEHVRKQVLDKLESYEQLVKEEHLEGEAAFERIKEVFGNEVAEREELTERTLSALEHAFEFMEDAFGDSQEMVSFVTELNTNYYSIQFLKENDCDKYYQYNKKLLFDKQQEEILPELNEVEQDLNTAIKMNIGILILMIVGGGVGILSSLYIALSFPAMIIWKIYRKIRHGYKLTYMKWNQFRLKTTTEAEDIVSSMLADLGIEGVQIEDKIPLTQSDKEQMFVDILPDMPEDDGCAYLTFYLDEEVDKHEMLLKVRQELEEMRSYLNVGDCTIEESQTEDVDWVNNWKQYFHQFYIDDILVIPSWENVEAKDSDKMVIHIDPGTAFGTGMHETTQLCIRQLKKYVTEDTEILDVGCGSGILGMLALKFGAKHSVGTDLDPCAIDATYENMDNNGISRDQYEVMIGNIIDDKEVQDKVGYEKYDIVAANILADVLVPLTPVIIHQLKKGGIYITSGIIEDKEEVVVEAVKKAGLEVLEVNHQGEWVSVTARKNMQHFFVSPEQVKEEKIYVEGGDVNHMKNVLRMKTGEELTVNDGEGSQYLCAVESYEADMAVLKILEKKQDESELASKIYLFQGLPKQDKMELIVQKSVELGAYQVIPVATKRAVVKLDAKKAKKKVERWQQIAVSAAKQAGRGIIPEVGEVCTYAQALKQAEELDVVLIPYELAKGMEETKQIIAGIRPGQSVGIFIGPEGGFEEEEVALAMKTGANPVTLGKRILRTETAGLTMLSVLMFHLEGMKEVYLDNSATTMAYRSVGELVQKVMCEDYGNPSSMHNKGVEAEKYIKEAKETFARLWKVQEKEVYFTSGGTESDNMALIGAARANKRAGNHLITSSIEHPAIINTVRFLEEEEGFRVTYLPVDQYGRIRLDALKEALCEDTILVSIMYVNNEVGSVQPIQEAASIVKAYNKDILFHVDAVQGFGKYKIYPKKLKVDMCSISGHKIHGPKGVGALYIGENVKIRPIVYGGGQQHDMRSGTENVPGIAGLSLAAKTIYDNLDEKVEKMRALKQHFIEGVEKIENTTIHGLYDETSAPHIISVGIAGIRSEVLLHALEDKGIYVSSGSACASNHPQISGVLKGIGAKQEFLDATLRFSMSEFTTLEEIDYTLDALYNIVPMLRRYTRHMRFHTFLLKYGEIGIKGKNRHLFEDALVRQVRYALKDVDGQFDVHKSQARIYVDCEGDYDYDETVEHLKKVFGLVGICPVVRMEDKGFEKLKKDVVAYMDEMYPDKNFTFKVESRRAKKSYPLNSMEISRDLGEAILYAFPESGIKVDVHHPDVMVNVEVRNEIYVYSQIIPGAGGMPVGTNGSAMLLLSGGIDSPVAGYMVSKRGVSLEATYFHAPPYTSERAKQKVVDLAKKVAKYSGPIKLHVVNFTDIQLYIYDQCPHDELTIIMRRYMMRIAEHFAKEDGCLGMITGESIGQVASQTMQSLAATNDVCTMPVYRPLIGFDKQEIVDVSEKIDTYETSIQPFEDCCTIFVAKHPVTKPNIDVIRRSEENLNEKIDELMKQAIETVEIIEVKMKTVKISLNSIDKVKSFVNDITKFDYDFDLVSGRYVIDAKSIMGIFSLDLSKPIDLNIHADDNVEEIMEMLKPYLCDMKKVALHNLGCKVNAYETEAMQELLEKHGYEIVPFQEGADVYIINTCTVTNMADRKSRQMLHKARKMNPDSIVVACGCYVQAKKDDIPEGIDIVVGNNKKQNIVEILENYEKEKNQDGQRETSDEQEKETETYQEILDINHEKVYEDLHLSTAAEHTRAYIKVQDGCNQFCSYCIIPFARGRVRSRSRDSVLDEVKTLSANGYKEVVLTGIHLSSYGIDCDDNLLSLILAIHEVEGIERIRLGSLEPRIITEEFAQTIAKLPKMCPHFHLSLQSGCNATLKRMNRRYTAEEYYEKCQLLRKYFDNPALTTDVIVGFPGETEEEFAESKAFVDKVDFYETHIFKYSRREGTKAAAMKDQVPDQIKAARSAELLELNRKKQAVYEERLLGTTQEVLIEEKIVRDGEELQIGHTKEYVKIGVKNPNNLINQLVNVEIENQLQILHMKNMTNTQFFQVESGPQISAKDILEIVYKALSEKGYNPVNQIVGYIMSGDPTYITSHNGARSLIMKMERDELVEEMLKTYIEHNEWEMTMRIMGLDYGSKTVGVAVSDPLGITAQGVETICRKDENKLRKTCARIEALIEEYQVTKIVLGLPKHMNNDIGDRAEKSMAFGEMLKRRTGLEVVMWDERLTTVEAERTLIENKVRREDRKKYIDKIAAVFILQGYLDSLAHTPLDMEKIKFMSEEMNEEVDFYVLEQTKVGGVSYILVTDSEDDDAECLILKDTSGENQSESVYEIVEDDVELSAVLKVFEELLEDVEIERMSISKEKFKEMLREKGLKVTNQRILVLEVLADHRDKHLTAEDIYELVREDYPEIGLATIYRTVQLLLEMQLVDRINLDDGCARYEIGEFFDGEERHHHHHLICRTCGKIIPFKDDLLENLEDKIEETTGFHVLDHELKFYGQCKECQKRGRKIVRMKRENNGKMRIIPLGGLEKIGMNITAFEYEDSIIVVDCGLSFPEEDMLGIDLVIPDVTYLKDNIQKVKGFVITHGHEDHIGALPYILRELNLPIYATKLTMGIIEKKLTEHNLLRSTRRKVVRHGQSINLGQFRIEFIKTNHSIQDAAALAIYSPAGIVVHTGDFKVDYTPVYGDAIDLQRFAEIGKKGVLALMSDSTNAERPGFTQSERTVGITFDHIFAEHKDTRIIIATFASNVDRVQQIINTACKYDRKVVVEGRSMVNIIQVAQELGYLNVPDKTLIEIDQLKNYPPEKTVLITTGSQGESMAALSRMAADVHKKVTIMPGDTIIFSSNPIPGNEKSVSKVINELTAKGANVIFQDAHVSGHACQEELKLIYSLVKPKYAIPVHGEYRHLKANAGIAKMLGIPKENIFILKSGNVLELSDKEAKVVDNVHTGEILVDGLGVGDVGNIVLRDRQHLAEDGIMIVVLTLEKGSNQLLAGPDIVSRGFVYVRESESLMEEARKVLTEAVEDCLTHQRNADWSKIKLVIRDTMNDFIWKRTKRRPMILPIIMDVMIVDERMVTYIRSLERPENPVIEAIEQEALDSFVPIIRKETQSFLKVMMLMNRPARVLEVGTAVGFSAILMSEYLPEGSHITTIENYEKRIPIARNNFKRAGKEEQITLIEGDALEVMKTLEGPYDFIFMDAAKGQYIHYMPEAVRLLSDGGILMSDNVLQDGDIIESRFAVERRNRTIHSRMRDYLYELKHSDVLETSIIPLGDGVALSIKKKKEEKENRMRNRHPELLIPASSLEVLKTAVMFGADAVYIGGEAFGLRAKAKNFSMEDMKDGVRFAHDHGARVHVTVNILAHNDDLEGAAEYLKELKEIGPDALIIADPAIFMLAKEICPEIERHVSTQANNTNYGTFNFWWNLGAKRVVTARELSLKEIKEIRAHIPEEMEIESFIHGAMCISYSGRCLLSNFFTGRDANQGACTHPCRWKYSVVEETRPGEYMPVYENERGTYIFNSKDLCMIEHIPEMIDAGIDSFKIEGRMKTALYVATVARTYRKAIDDYLEDPKKYEANMPWYKDQISNCTYRQFTTGFYFGKPSEESQIYDSNTYIREYTYLGIIGEIKDGLYRIEQRNKFSVGEVIEIMKPDGQNVEATVEKIIDEDGNEQESAPHPKQVLYVALSADASVYDILRRAEKETEMEKHRITVFCIEYNKTAGEGAVVLKSFPQPLTAAEEKYYVQKYTEGDLEAKHILIERNLRLVAHIVKKYQPPPEEMEDLLSIGTIGLMKAVVTFDPEKSARLATYAARCIENELLMHFRGKKKSSKEVSLYEPIGTDREGNEIQLFDVIEMGEEDVHHRLEKKEDVIRLYQKVESELSARERIVLKLRYGLYNEEEYTQREIAKMLGISRSYVSRIEKSAIEKLRAFFPSMKVLVLSGRFGMGHEMAANAICEQFRKLDKDTEIVKKDLLEELYPHISKLIFGGFRLMVEHCHGIYNFIYKMSGKMKVEMQPRGAAIYKKLKKILEKEQPDVIVCTHPMCVKAIASYKEKTGLSTPLVTCITDISMHPEWKADQTDLYLAPTREIKEHLICEGTKAENILVTGIPVRQQFLNMDRKHLENEKEVRRVLVMGGGLGLMPDLRRLLGKLHSMQSVQTIVVTGKNHKMYEEWVNRYEDVKVLGYTENISKYMRWADLVITKAGGITLFEILHSQVPLFVIHPFLEQEMNNARYAAEKGFAKVVWGKHEDYIPELEKLLNDRKLLKQMDENVRHARKEMIDVSLDKAVEIMEERMTAMKKAVKAGIIGAGALGYSIIPTYLMKYHWIIRDKKMAKKEEKVLYLTFDDGPDTVYTNKLLDLLDQEQVPATFFMVAEAAQGHPDIVKRMKKSGYSIGIHSLSHQSAMLFGPGRTKRDLKESRKIMGKMGIDVKEYRPPWGHLNLMSLYCIRKMHLQLIFWDVMAQDWSAKETADSICNKILRRVFPGAVICLHDGRGENGAPGRTIEALKKAIPMLKAQGYEFRRIEEKYETAGRSEISMKQQEGQRSVKKYIVLFILLVLVVIFIVLKGADIESVWNAMKNADPKWLTAGLGLAAVFNIAEGINLRKVLVSFGYRVSFKEAMKYAYIGYFFSSVTPSATGGQPLQLYAMSKDKIHVAHGTMALLTELTSFQIAAFLMENIAAFWILTGRIHLNKIMLILALVGYIMNLVFIAALMIVIVSDRLKRKIVKGIRFLVMKLPFRHKEKMESKINDILHDFENCKDFFKEDPNLTLQVIGVSLVQIICWFSVPWAVYHAMGETGSTFGSLFLHQIILYMTTALLPFPGAEGISEFSFVKLFTGMFSSVPVAAVVLVNRGISFYFLLILSGILGVVLGRFNGRSADQSGTKYKLQQETENGTGKILTMSFCTVLSAAVQGLSVEMIRVEADVSNGLPMFHMVGYLSSEVKEASERVRTAIRNSGMKLPAKKIIVNLAPATVRKRGASFDLPIALAVLAAMNYVPEEALKGVAVIGEVSLEGKIRGVSGVLPIVMEAKNQGCTACILPEENEIEGRLVSGIKILPADNLEKLCAYLNGDEKEIHRKKQGRSSAQRNIFENKEEDFLDICGQNAVKRAAEIAVAGGHNLLMAGPPGSGKSMIARRIATILPELSLEESLEITRIYSVLGMIDKEQPLITRRPFRSVHHTITKTALVGGGMTPRPGEISMAHGGVLFLDELAEFPRNVLEVLRQPLEEHQIHIARNYGNFTFPAEFMLVAAMNPCPCGNYPDMQKCSCTPSQIQKYLGKISQPFLDRMDLCIETPKVEYRELDIERIGKKEEESSEVIRSRVVEARKLQKKRYEGTQIRTNSMLGPGEIRTYIPLGSAERKLMEKAFERMGLTARTYHKILRVARTIADLDYSEKVTEKHLKEAIAYRSLDKKYWGRMIYEYWLAGIKEITDLKKQKLREVYGSGKAIYYIEETKLDKLRFLNEKDVAILKNAKKDTELEEKWRRTEEKRIQFIPYFLKTYPEKLKYITDPPYALYVLGQLPDEKRKSAAIVGARNCTAYGEQMALQYGKSLAEAGIQIISGMARGIDGAGQRGALNSSWAKESGVTYAVLGCGVDVCYPRENIGLYMDIQEKGGIVSEFSPGTQPYAWNFPRRNRIISALADWILIMEAKERSGSLITADLALEQGKDVYALPGPVNSVLSQGCHRLIRQGAGILITPEELMDEWNINPVEIGQKGNKSEKMLESPEFMVYSCLDLFPKGTNQLMKETGLSVTELMERLITLELNGYVKEVSRNYYIRLQMARYLVIVESPAKVKTIKKFLGSNYVVTASNGHVRDMPKSQMGIDIENDYEPKYITIRGKGEILAKLRKEVKKADKIYLATDPDREGEAISWHLSKALKLEDKKFYRISFNEITKNAVKASLKNPREIDMDLVDAQQARRVLDRIVGYKISPLLWAKVKRGLSAGRVQSVALRIIADREEEIDAFIPEEYWTLDANLKVKGERKLLTAKFYGTEKNKMTISSKEELDAIVKEVENADYSVADIKKGERTKKAPVPFTTSTLQQEASKALNFATAKTMRIAQQLYEGVDIKGSGTVGLITYLRTDSTRISEEADAAVREYIKEGFGEEYVAEGDAKKTSDKKIIQDAHEAIRPTDVTRTPAAVKEFLSRDQFRLYQLVWKRFIASRMQPARYETTSVKIAAGQYRFTVAASKVSFEGFKSVYTEAGEAKEENNVLLKGLDMDSVLTKESLDTKQHFTQPPAHYTEATLVKTLEELGIGRPSTYAPTISTIIARRYVAKENKNLYLTEIGEVVNHIMKQSFPSIVDVNFTANMESLLDGVAEGKVRWKTIIENFYPDLEAAVEKAEKELEQVKIEDEVTDVICEQCGRNMVVKYGPHGKFLACPGFPDCRNTKPYLEKIGVPCPICGKDVVIRKTKKGRRYYGCEDNPECEFMSWQKPSTKKCPRCGAYMLEKGNKLVCSDEQCGYVENIENTKENMGVQLLDKTRKINKLLHNNSSSKVVFNDICEVLTEILDSNVLVISKKGKVLGGSKCEGVPYITELIEREIGKHVDDMLNERLLSILSTKENVNLQTLGFSEETVKGYQAIITPIDIAGERLGTLFIYKKDKVYEIDDIILSEYGTTVVGLEMLRSVNEESAEETRKEHIVQSAISTLSYSELEAIIHIFDELDGAEGILVASKIADRVGITRSVIVNALRKFESAGVIESRSSGMKGTYIKVINDYVFTELDRIKAERTKMGYEGCTAKLRMERVILEDSFFDETEYLCKIIAYDEEEETLYLVSEEAELTSYSLDGIYECSIENLEDPVICKGIIKERYWNKVGKVMKFKIQNGFYKKLLNMKLVPLGDRVVLKQCVAEETTKSGIVIPGQSKEKPQQAEVIAVGPGGMVNGKEVEMHVTAGQQVIYSKYAGTNVEIDDEEYIIVKQDDILAICEMKKAQKRSIKSPALSRELSVGARQQTKTPNSPQSSFAEQIMWIEKIRDTRYLSGIMITMELAITTKKMNFLTIFLDKMLLKAEGTVDLYTFLKTGLDLFMVYLLAGPKGTGKTQQMIEQANEAAKKCNGNVVFIKKTHRDTASVTFDIRTICMDDFPAITNIDEYIGFLYGMYSSNHDIECVFIDGILKHADISLDNIPAFIDRLKQVSKECEVEFYVSISASKEDLADVNMEGCKYLNMSGIKDAKKKRARRRRKRQIQRILLIIAMVLILIGFIFLVRAAIRTVVNKFTVPAVTTSANKTAGTKSTAGKHKTKKKSASKKKTSTKNTSPKADSSKRAVQLETVTISKKNKKNPDKVSLTISSTGDCTLGTDENFSYSTSLNAYYESYGADYFFQNVRSIFQKDDLSIVNMEGTLTDETAREAKTFAFKAPAKYAAILSGSSIEAANLANNHSHDYGKKSYTDTISALDDAGIASFGYNRVKIFKVKGIKVGVTGIYELADHQKRASQVKKNIKALKKAGAQIIIVNFHWGIEKQYTPDENQKALAHLAIDEGADLVIGHHPHVLEGIEKYNGKYICYSLGNFCFGGNSTPGDTDSMIVQQTFTFHKGKLKKSSKLNIIPCSITSSSGYNDYCPVPLTGDEKQRVLDKISQYSEELMEISILLAEQILAMFLTMAVGFGVVRAGLFKTEDSRIISNMVVYICNPCVVVHSFQIELTDDKIKGLMIAIGLSVVVHMVLIIGSEILSFIFHFNSIEKASIIYTNAGYLVIPLVGAVLGEEWVFYTTAFILVQTVLMWTHGVKLIGQEKELNIRKILCNPNVIAMIIGIALFALEIRLPTVVDSCVSGFGDMISPASMMVIGMVIGDVDLKWVFRQKRPYLICLLRLIVFPLIAVVAFAGLERSGIHPDAEYILMIVLIATSAPAAAMITQLAQIYGKDSRYASVINVMSVIFCIITMPVMVLSYEMLIALMKGKTKAIITVFVVILAGIYYYAAIPAINIHSSETWFFIMIFLVILAVLYLGRKKLNRYEVRESKVVKGFLGVIVFLGVVYLLGTLFSSPVINAKKYQKLMTVKEGEFTKDVDELSFDKIPLLDKDTAALLGDRKMGSMVDMVSQFEADDIYSQINYKGNPVRVTPLKYASLIKWFTNQSEGIPSYIRINMANQSTELVKLKQGMKYTTSDHFNRNIYRHLRFAHPTYIYGELSFEIDENGDPYWIAPVKKFNIGLFGGETVGKVVICNAVTGKTKTYDVGNVPQWVDRVYSADLLVNLFDYYGKLKHGFFNSVLSQKDCLETTDGYNYLALNDDVWMYTGVTSVNGDQSNVGFVLANQRTMETKYYKVEGATESSAMSSAEGQVQNLKYQATFPLLLNIAGEPTYFVALKDDAGLVKKYAMVNVQKYQIVAIGDSVSQCQENYNELLLKNGVKEKEKDTRKEEEISGKITKIAQAVLDGNSHYYLMLEDSDAIYDVSVADIIDVIKCELGEQVTVTYKEDKDVNTVTKLDIGEKAKDKTSSDKIEKETGTQEMNTKMIRYILCRMLGVEAVLLMIPVIVAALYQEMSGIAFLIPAGILLLLFFLAGVKKPEQSHIYGKEGMVIVALAWILWSLFGAMPFTISGFIPNYMDAFFETVSGFTTTGSSILRDVEALPQCLLFWRSLTHWIGGMGVLVFVLVLTSLDKKNSMYLMRAEVPGPEKDKLVPKAMSTARILYGMYLIMTVVEIIFLMLGGVNLFDSMIFSFGSAGTGGFSNYADSVAHFHSAYIDGVITTFCALFGVNFSLFYFMLLGDFKSVRKNEELRTYIMLIVGATALITLNIHSMFPSMIKAFRYAIFQVVTVITTTGYATTDFAKWPMFSKSILMMLTVVGACASSTGGGIKVSRLLVGIKCIKREIVQLAHPKSVGIIRIGGKKVGSDILRTIYIYFIAYVGILIVSVMLVSLDNFDFETTFSAVLTTLGNVGPGMAKVGPMGNFADFSILSKLVLCFDMLAGRLEIFPFLVLFTAPAWRRKFMKIVIIGDGKVGHKLTTQLSEENYDVVLIDQNEGKLKEAVNKLDIFCITGNGADVDVQRQADVPHADLVIACASTDELNMLSCLLAKRLGARHTIARVRNPIYYRQIDLLKEDLHLSMAVNPERTAANEIARVLLFPETSKVETFMKGRVELVEFIVREDSALAGLSLAEVYRKFQIKILVCAVKRGQKIYIPDGEFILEKGDKMHIVAAHQDLKSFFRALGHRNAKVKKVLICGGGHVCFYLAMQLLQVGMQVKIIEQNMKRCEELCELLPKATVIHGDAANHDLLMEEGIHEADALIALTGMDEENIIMALFAKLQGVNKIVAKVNEDSRAQMVEGLGIDSIVSAKSATADAIMSYVRARNESASNVNVESLYQLLGGKVEALEFIIKCECSFTNVPLRELRTKKNNLIACIGRKRRIIIPNGEDHLEVGDSVVVVTMDHIDKFSDILEMKVYRTDEIRNVVLLGHGGSGKTSLAEAMAYVSGATNRMGKITDGNTISDFDKEEQKREFSISTSLIPIEWEKAKINILDTPGYFDFVGEVEEAVSAADAAVIVVSGKAGVEVGTEKAWELCDKYKLPRMVYVTEMDVDDASFRQVVQDLTDRYGKVIAPHFQPIRENEKLVGYVNVIKNAARRYTGVGQREECEIPEYCKPNLEIYRDKLLEAVAETSEAFMERYFDGDEFSVEEIRSAMRTEVMDGDIVPVAMGSNIQAQGVANLLSDIVRFFPSPDNRSCAGINRKTNEIFEGNYDFAKAKSAYVFKTMVDPFIGKYSFIKVCSGVLKGDDTLYNGDSDAEAKLGKIYTMVGNKPTEVSELFAGDIGAIAKLANTKTGDTLSTKNTPVMYGKTEYSKPYTYMKYICNNKGDEDKVSQALQKMMAEDVTLKTVNDSENRQTLLYGMGDQHLEITASKLATRYKCEIKLETPKVAFRETIKKKSDVDSKYKKQSGGHGQYGHVKMRFEASGDLETPYVFEEEVVGGAVPKNYFPAVEKGLQEAVVKGPLAGYPVVGVKAVLYDGSYHPVDSSEMAFKTATIQAFKKGFMEASPVLLEPIASLTVTVPDDYTGDVMGDLNKRRGRVLGMNPVSGGKQEIVADIPMTGLFGYCTVLRSMTGGRGVYSYEFSRYEQAPSDVQEAEISKRAKEEMKHKIGFIGLGLIGGSIAKAIRQYYPDYEIVAFDKNKESLALATQESMIDVAATTIDNNFQNCNYIFLCAPVAYNTAYLKQLTEYLNDDCILTDVGSVKTNIHEEVQNLGIGKYFIGGHPMAGSEKSGYSNSKAMLIENAYYILTPTPQVAEEKVQTYEKFVESLKALPVILDYQLHDQITGTISHLPHIIASSLVNFVKTHDTHDEMMKNLAAGGFKDITRIASSSPIMWQNICLKNKDNIVDILDKYIDSLEDFKEAIEREDDLDLYNRFESSRNYRNSMPSSSAGPIKKAFAVYCDIIDEAGGIAAIATILASNNISIKNIGIVHNREFEEGVLRIEFYDEDSSKRAVGLLQKFRYIVYERMSVRTIAPTRGLKGEVTIPGDKSISHRSIMLGSIALGTTEITHFLDGADCLSTIDCFRKMGVEIERKPSSILVHGKGLRGLTAPASTLNVGNSGTTTRLISGILSGQNFATTLSGDDSLNSRPMKRIMTPLNTMGAHIRSLNDNGCAPLHIRPGALHGIHYQSPVASAQVKSAVLLAGLYADSPTSVTEPALSRNHTELMLQGFGAYVATDLHTDGTATAHVEPCKELYGQQICVPGDISSAAYFIAAALLVPGSELLVKNVGTNFTRAGFLKVCKAMGADIETVSQTIEGGESRADLLVRYSHLKGTVIKGDIIPTLIDEIPMIAIMAAFADGQTVIRDAAELKVKETNRIDTVTAGLKAMGADITPTDDGMIIEGTGHLNGASIQSYLDHRIAMAFSVAGLASDGETQIVDSQCVDVSYPEFYATLNSVSIMTEYYIKMKDLAVGYQGNALISDINLKIKKGEIVTLIGPNGAGKSTILKSITRQLKLIGGEVYIDSEEIRKLSYKEMAVKAAVMLTERMKPELMTCHDIVATGRYPYTGRLGILSREDERKVDEALEAVHAQELGIRNFQEISDGQRQRVLLARAICQEPEVMILDEPTSYLDIRHKLELLTILRKMAKENGITVIMSLHEIDLAQKISDQVICVKGDRIAEFGDPEEIFTEATIRDLYEIDNGYYDPIFGSVELPKPEGEPEVLVLSSGKTGIPVYRKLQKAGIPFAAGILYPGESDYQLARLLASGIISEEPYEPISDETYQKALKIMEKCGKVINAGVKVGSMNQKMGELLRIAEERRMLVSIMADTYNQKTDRQNTAGSVYQKEIFKRRSRYILVFSVLTAAFLIVTVLNINTGNVHISLPEILKILARRGEGGTEANIIWKIRLPRVLMAAILGGALSLSGFLLQTFFSNPIAGPFVLGISSGAKMMVALAMIFFLERYAFVSSYTLIVAAFIGALISTGFILLLSRKMKHMATLLVGGIMIGYICSAITDFVVTFAEDSDIVNLHGWSQGSFSGMNWSNVQVAVIVIGVTTVLTFFLSKPIGAYQLGEAYAQSMGVNIRFFRVALILLSSILSASVTAFAGPISFVGIAVPYLVKHALRTSKPLVVIPGTFVGGAVFCMICDLIARMAFAPMELNISTVTSIFGAPVVIFMMVRGQKGRMKKRTYRLLCVLASTVLLVTGALTGCSSSGRSGVSKGDGTQQTEENGAEEKKAPKIDGLKYQKTMQLKYATGFDVYYYKGGYKLLDVHDDRQYLIVPEGKKKPADLDKDIVVLKQPLDHIYLAATSAMALFDSMDGLESIRMSGAQASDWYIDNAKKAMEEGRILFAGKYSEPDYEMLVDEDCDLAIESTMILHTPKVQEMIEDLDIPVFIDRSSYESHPLGRTEWIKAYAAMLNKEDVADTFFEKQTKVIENLKDFKNTGKTVAYFFVNADGTVVVRSSKDYIPKMIDIAGGKYIFSDLKNTESKSASVELSMEEFYSKAEEADYLIYNATIDSPINSIAELTAKNELFKDFKAVKNGNVWCTGKSLYQATDIVGNLITDIHLMLTDGDEKDMTFLYRVKMKHNSKQFLALFMAVSMAVAPVSGVYAEDQNAAVEDTLSENKQDNDEAGQTEPEAAAGQTESSVTTDTSQEVTKEAGKNQVAVEKVQNTQEDGTAPQTEPIGEDEIFENITDISGMAGALKDGEYSVDADHFSAKLTSGGSSKVKIECQKVIVKNGKATAWINFSSSKYDKVWVKVNGTQNIYHAKPREGEAGVAFEIPVNLNSSMTFMAHTSSMSGKNIAYTINIAIPEDTVPSTPSTPDQTVITELSFKEGSELSMKEGEVQKLTPQFTPALSASETAPDMTWTSSDPKIVTVAKSGTQAEVTAVKAGTAEVTVSINNAEGTELKATCKVTVTASETENKTLTDGNYQVDVDTGNKMFKVTNCILTSEKGKMYAVITLSGTGYDYLYMGSAADAAEAAAKDYISYVADEAGKYIYKVPVESLDKGIAVAAHSIKKDKWYDRTLIFSSASAKRIIADGTYQVNAEAGGKMFRVTDCVMTVKNGQMTAAVTLSGRGYNRIYLGDVNNASDDEKNWILPDSLLAEQYTFQIPVEKLDEVMTIAVHTTKSNKWDTRTLTFHSEGMTKIADSNHGNASNGNNGSNGSLTPGGNNNNPGNTSNGNNSGSTGSNNGNTGNNTTNNGKPDKESKYESDLNKSTARVNSATGLKDGVYTPDSFSWSGGTGKVRISCSKVTVTGGQAYATITFSSTHYQYVKANGNVYYPSSKTGSSTSFVIPVELNKNNTIVGMTTAMSAAHEIKYTIFVYIAEAAKANASTRANGKEITVIGVNGSDSSKTAAASKKLDEVAPEIIGLEYQSETKAEHAKYFKIYHYDQGITLLEIDMSKKTGRKAAGKKWKQSSDTSGLNPAEQEQAALYLNKVVKYLIVPENAEIPAGLDKEVIVVRQPADHIYAGTNEIISKIAKLGQNDKVTAVGVKKKKCKNETIKEKMEKKEIIYTGKSGKLNYKKLVKNKCDLALLSSGILPKKGSSKKAARKKMKAYQKMTEKMTLLEMPVIVDRSKDEKGKDAKKEWEKVYQVILGCEDQSAEMVKMNVKFETPEQLVEFSRMCQKVEADTLIEDTVHKLIIDGKSVMGMMTVTLNQRLIFVVDGSDEKEVLSTFEKYRTEDMVQKQNLGMSTYDYYRIFYHVAQQHSFTKAAEVLHNNQPNITRCMNNLETELGCHLFVRSNRGVSLTPEGQKLFNHVAIAFEQLELGETELKRDQSLTSGLISIGVSENALRIMLLPKLEAFHNHYPHVRLKISNHSTPQAIASLESGLVDFAVVTTPLSVQKQFQKISLGSFREILIAGPKYKELASHICSLEELAEYPFVSLENNTSTRDLHIQYFSSHGFPFRPDLEVTSTDQCLALIQHNLGIGFYPEKLAEEPLKRGEILQIHLKESLPARHICLVQNASKPQSIAAQKLIETLIRIMGVMKSLFSGKQMSEAFICSAFLALSGGFQDAYTYNTRNEVFSNAQTGNVVLMSQNFMTGKWEAGLKYLFPLFAFALGVLIAEQIQHKYKYAKRLHWRQGILGAEIIILFIVGFIPQRGNMIATVLVSFACAMQVQSFRKVNGFSYASTMCIGNLRSGTAALSFYLRERRPEQLRQAMYYLGIIVLFAIGAGIGGNLSANYGIHMIWVSCGLLIVSFLLMFLDIEARRSRAMTLQQLRYITMVAEKGTISEAAKELFISQPSLTNAIRELEQEMQVTIFHRTNKGVTITAEGDEFLAYARQILDQVGLMQERYLNVNERNPRFSVSCQHYSFAVNAFVDVIRKFDARKYDFTLRETQTYEIIEDVAKLKSEIGILYTSSQNETIIMKLIRQNDLKFEELFVAKPHVFISSKHPLADKEALTLEDLEEYPYLSFEQGDYNSFYFSEEILSTLDRNKNIKVRDRATLFNLAVGLDGYTVSSGVISKELNGENIIGKPLLVDEYMRIGTIVRKDVALSRYGKVYMEALKKYTGGMMNIQKNNHAAHTKIEIENVLPTEIEKRSFEIITEELEQEGIVLPEIQAPITKRCIHTSADFDYAKNLVYSEHAVEKALEAIRGGASIVTDTQMGRSGINKKRLAQYGGQVYCFMSDEDVAQAAKKNGTTRAVASMKKACELNEKLIFAIGNAPTALIHLYELIKDGRIRPELVIGVPVGFVNVVQSKELILTLEDTPYIVARGRKGGSNIAACICNALIYMLMIQGTMSNAGKSLLCAGLCRIFKQDGYRVAPFKSQNMALNSFITEDGLEMGRAQVVQAEAAGVAPQVEMNPILLKPTNDVGSQVIVNGEVLKNMSAREYFAYKKQLIPDIMKAFHKLEEENDIIVIEGAGSPAEINLKKDDIVNMGLAKMVDAPVLLVGDIDRGGVFAQLLGTLMLLEDDEKERVKGLVINKFRGDKTILDPGIVMLEERGGIPVVGVTPYMQVEIEDEDSLTERFNMTKGGKGAEERIGLVDIAVIRTPRISNFTDFMLLENAPGVNLRYVKNPRELRNPDMIILPGTKNTMGDLKWLRQSGMEAKILKAHAGGCVVWGICGGYQMLGQSLSDPEGVEDGGSMKGLGLLPVTTTFTTEKTRTRVNGTLLHVEGNLKALENLKFEGYEIHMGKTELLEGCPMNQIHDTVKKKDRQIPDMEPENRIENSTDGISHGNVYGTYIHGIFDKEKIVSEIVKSLAEKKGLSMEEVEGVDLKAFKESQYDLLADTLRKHLDMKAIYQIMGMQKMAEPKETVHGGDIYRNPSVTDYSVNSNPLGVPEAVRKSVQESADRIMYYPDVRCDRLRESISDFERIEKEKILCGNGAAELFFAVVMAVRPKKALVTAPAFSEYERALGTVGAEVQYYRLKEEQDFRIQEDILEQITEDTDMIFLCNPNNPTGQTTEKELLIRVMNRCNKCGTILVLDECFIEFLEEPERYECREYLTQYPNVVIIKAFTKIFCMPGVRLGYALCENAALRKRMRAMLQPWNVSVTAQEAGVAALVDCEAYLKRTREYIKKEKFWMTERMRKLGLNVWGSEANYIFFKGKAGLYEKALKSGLLIRDCSNYEGLTEGHYRIAIRSEEENERLITWLEKLMQALSKAAAGKSYTIKWMFGIPEVLDKIRKCKIDEGSEITVIQNSGRDLIIRSGEKRIAMSSDAATRIQVMLVVVTVSTGVPAVILSVAYKYFWQLGLALESFWCYQILATKSLKVESDRVYIALKNKGLEAGRKAVSMIVGRDTQNLTEEGVTKAAVETVAENTSDGVIAPLFYMLIGGAVLGFTYKAINTMDSMVGYKNDKYQWFGTAAAKLDDVVNFIPARVSAVLMILAAYLTGMDGKNAARIFRRDRFNHKSPNSAQTEAVMAGALDVQLAGDAWYFGKLHKKPTIGDPVREMELLDIRRSHKLLYGTAMLGLILGIILRILVLMRIYLIRHSMTKGNKEKRYIGTTDESLCLEGIQLLEERKGMYPEVTYVYVSPMKRCVQTAEIIYPEMMKAGAYSCNEKLRECDFGLFENHNYIELSGCPEYQAWIDSGGKLPFPEGESREAFIRRTLEGFREVVRDAQAHDRETIAVVAHGGTIMSIMERYAVKEDGTPAGSYYDYQIKNGEGYELRISENDIYDDRDRGGLCSGSDLRGSKMAVSSGEADRASDIGNRKNYQKLSAGEMIMIIGGAYQGKLAFAKKIYPDVTWADGAVCTEEELYSCEGIYHFHQYIERKIKEGEPIDDLAEELIRKNPELILITDEIGYGIVPVDRMEREYREQTGRVCTRLAAYSEKVYRVMCGIGQVIKEVMKSIKRIWNSFKIAFSMYSRIPMPRSEWTDENKSYAMCFFPWIGAVIGLLSYGVFRFSKWFDGNGGGNYSLFFVIFLILIPVFITGGIHLDGFLDTQDALSSWQTKERRLEILKDSHAGAFAIISCTIYFLMYIGVYSCLSVRSMEVIAYSFMLSRTLSGLSVVTFPQARKKGMVADFSESASTRITRMVLGIYLIVLCFLIPLTGGICGIGCVISAGVVFGYYYRMAMKNFGGVTGDLCGYFLQVCELVMALVVVVVDIVVKSGIIKMIHLVTGGSGSGKSEYAENWLTGRNKKDGTYIYIATMQPYTEETMKKIERHHRLRAGKGFRTLEKYTDLSELEIPKNQGILLECISNLVANELYREDGTLNDLKETKEKVLAGVRRLSNSTTRLVIVTNEVNADINGYSEETEKYRECIGMVNQSLAELADIVTEVVYGIPVCIRKEQKKYEEYKKNMEMAEQSLEQLEQEFHQIVSGIHPADVVTKGNAQKKWNSIAKPLHSLGKLEDHIMQIAALTGDTDVNLNRKALIVMCADNGVVEEGVTQTGQEVTAIVAENFLTCNTSAAIMCKKAGVDIFPIDIGMAADTKVPRYKTANGTANMTKGLAMTRMQALQAILTGIHQVKEKKEAGYKIIATGEMGIGNTTTSSAVASVLLGDEPAEITGRGAGLTNEGLERKIHAIEKAIAVNRPKWDDPVDVLAKVGGFDLAGITGLYLGGAVYRIPIVVDGFISAVAALVAVRICEWVKDAMIVSHVSKEPGMQKILKELHMDAPLHADMCLGEGTGAVAYLPVLDLAAEVYGRMSTFSENDIEDYKELGEKEMKLPRILITAMRSGAGKTMLTCGILKAMKMQEINPASFKCGPDYIDPMFHKTVIGISSYNLDSFLCGENGVREILKKNGAGADISVMEGVMGYYDGIAGISSEASAYDIARITDTPAVMILDCKGLSVSAVPCIQGFLHYKEDSRIKGVILNRLSPMMYGRMKEMIEVQTGIKVYGYVPVMKDCALESRYLGLKLPKERKDTEDKLTRLGEQILKSVDIAGLLELAENAPELQEKKTQGYTSEMVENLAENAQYSTESVRTKDTVRIGLASDDAFCFFYQDNLELLQEMGAELIPFSPLYDKQIPEKLSGLLFYGGYPELYAEELSKNESMKTSIKKALNGGMPCIAECGGFMYLQEYIRDESGTEFPMVGFLEGKSYPTGSLKRFGYVTLTGGRIFGKEAGGIPAHEFHYYDSEVCGEAFLAEKPMSNRSWKCMISTDTVLAGYPHIHYYGNEKITENFLEQCRRCREQEKRAGERDRTMKDKKILLYAGTTEGRKLASYLGRRGVRLHVCVATAYGESLLPEEKNITVTHDRMDSGQMGEFMRVFEPDYVIDATHPYAKEVTKNLKSACEVMQVPYLRLVRGSEETKESICVENMDEAIKYLEKTEGNILVTTGSKELESYTRLTDYESRVYARVLSIGQVAVNCEELGFSGRHLICMQGPFSTEMNRAMLKEYDIAYMVTKESGLAGGYPQKCQAALETGVKMVVIGRPEEEEGMNFEEMSKFLQKELELDNHWKVTLVGIGAGARDQVTLEAKRCCQEAELLIGAGRMIEAVAEVGQTIYEAYRPDEIISYIKENPEYENVTIALSGDTGFYSGAKKILELTKDDPQIETKVVPGVSSIIYFASKLGVTWEDAALVSLHGRKENLMAVIKENKKVFALVSNAEEIRQILTKMTEYGMGEVTVRIGTELSYKNEEIQTGTARSLLHYKGENLAVLYIENESGGESPVIPAIPDDTFVRGDVPMTKEEVRSISIAKLKIKKDAVVYDVGAGTGSISVEAAMVATQGNVYAIEQKVEAQELIRENARRMHVDNLHVIEGMAPEALEELPAPDCVFIGGSKGKLYEILDAIRKKNPFVRVVLNAISLETMMQVLKYTEENEIEEAEVIQVAVSRAKKVGSYHMMNGQNPIYVISFTSRPAKNEADPENEDDFVLEEINLDEVEPEDMTGDMAGDIVEDITKVISVGDLTPEKIREEMEESEMNKVYVIGMGPGAYEQMTVKAVRTLEKCDVIVGYTVYIELLKEYFPDKRYLTTSMRQEAARCRMAFEEAAKGAVTAMVCSGDAGIYGMAGLMYEIGEEYPEVAIEVIPGVTAALGGSAVLGAAVGHDVSLISLSDLLTPWELIEERLLCAAKADFVICLYNPSSRKRSTYLAKACEIMLEYKAEDTVCGIVKNIAREGETMQTLTLKELKETTVDMFSTVFIGNKQTKVIREKMVTPRGYRIMKIAMISFTGNGRRLERSLAHELEKEGHQVLQAVKCKELESDKDAVKCSAREWTGEQFRTRDVLIFIGAVQIAVRLIASFIGSKTTDPAVLVLDEKGQYCIPILSGHIGGANEMAERIAEMAGALPVITTATDIRGKWAIDVFARKNHLYIEDMQKAKQISAKILEGKTVVAAIESGRDSIEGTVPEEVKIVPETYENPDIYIGIYERKLSSHVLRLIPQRITVGIGCRRGTSAEQIEQLVDKILKESHINKKSIGRIASIDLKKDEEGLLTFCNKYNIEPEFYPAEELKKVEGEFSVSTFVKKVTGVDNVCERSAVYTGGTLRIRKQAENGVTAAFAWDNWRVKFEMIHFVGAGPGAEDLITVRGQRYLEQADVVIYAGSLVNPGLLKSTKETCEIYNSAKMTLEEVLEVMEQAEREQKMTVRLHTGDPCLYGAIREQMDHLDELGIAYDSCPGVSSFCGAAAALNLEYTLPEVSQSVVITRMEGRTPVPAKEKVAAFASHNATMVLFLSTGLLEKLEGQLIEGGYKEDTPAAIVYKATWPEEESYICTVSTLAETAKAHGITKTALIIVGDVVTHHAYERSKLYDPEFTTEFRQGVKMPKKELAKGYTTGTCAQAATRAAMQMLFTGEKVEQVSVELPQGEKLQLDITDIQRKYTDRELPDMVSCAVKKNSGDDPDITNGVLVYSQVRLSETGQIHIDGGIGVGRVTRPGLNQPVGEAAINRVPRQMIRKEVEEACEEVGYTGGIDVEISIPEGARLAKETFNPRLGIEGGLSILGTTGIVNPMSEQALIDTIEVEMKVCLAEKYRYLIIAPGNYGLDFLKEQYSIEENDVVKCSNYIGQTIDMAVEQDCKGVLLVGHIGKLIKVSGGIMNTHSRWADCRMDLFATAALRAGIAGEKAVEFLDCVTTDDALEKCSEEERTRIMEKIMMRMEKYLNYRGKGEIQVGAVTFSNVYGILGKTEKAEELIERFRKERHIQMIPGRTIVLHEMPDDFKTQPSGDSGMKIACGEIKAWEQECKNKNGNEMKRQDFYYELPEELIAQDPLEDRSSSRLLVLDKETGAFSHHVFKEITEYLHEGDCLVINDTKVIPARLIGSKVETNAKIEVLLLKRKENNVWETLVKPGKKAKVGAKISFGDGLLMGEVIDVVEEGNRLIKFDFDGIFEEILDQLGQMPLPPYITHQLEDKNRYQTVYATHTGSAAAPTAGLHFTPELLEEIKAKGVDIARVTLHVGLGTFRPVKVDEITEHHMHSEFFMIDEEAAEKINRAKETGHRVICVGTTSCRTVESAADENGHLEAKSGWTQIFIYPGYKFKVLDCLITNFHLPESTLIMLVSALAGREHVLAAYEEAVKERYRFFSFGDAMFIQMQNSYDNQEKLARQNSCCASGNLEYAGFWVRMAAYMIDSVVVFAGLLIVRLIFAGISLAGGGAITGTDILFHYSLKDIVLYALKVLYFIAFTYLTGTTLGKKAMNLRVVSKNPEEKLTLFNVVYRETVGRFLCSLPVNIGYIVAGIDSEKRGFHDLLCDTRVVYQKKIKAWMAQPGTVVPECEKLNVEEQKPQTSEGELSKTQKNVQMKESGIRELKKTENTQSSVVEKLGKPVYNGYRLVENKSEKEIASNATVNENISEKDTMKKKQIIGLVVAAALFVGVSAASVFTNTISKNLLQSSADDIINLGGSYQFNPPSEDYIAIVRVEGTIQEQSGSSILEASSGYQHDSTMNYIDELMDDSNNKGILLYVDSPGGTVYESEELYQKLKEYKETTKRPIWDYMAHYAASGGYMVSMASDKIYANSNTTTGSIGVIMSGYDMSGLYKKLGIRYVSITSGKNKDSSKFTDEQIAIYQDQINEAYEEFVNIVADGRDMSVEDVKKLADGRTYTAKQAKNNGLIDEISLYPDMKDAMSKKLGTSTFYEMESDEGLLQSLFSKAESLVPKSEAQVLTETAKSVESGVPMYYAEQLRMNTSLSWIKAYVPDLDVTAQEYTDAMTLSGTKVEGYEKLDADLDKIVIGQIDKIEKHPDADKLIICQVNVGTETIQIVTGAPNVKEGDKVPVVLAGGRVAGGHEPGQRVEGGIKIKKGKLRGVESDGMMCSIEELGSNRDMYPEAPEYGIYIFDDDAVVGESAIKSLGLDDVVVEYEITSNRVDCFSVVGIAREAAATFNKAFYPPVVTPTGNDENAADYIKVTVKNPELCPRYCARIVKNIKIGPSPKWMQRRLASVGIRPINNLVDITNYVMEEYGQPMHAYDLDTIEGKEIVVRTAEKGEKFTTLDGQEREMDESVLMICDGKKSIGIAGIMGGENSMITDDVQTMLFEAACFDGTNIRKSSKKIGLRTDASGKFEKGLDPNNAEAAIDRACQLIEEMGAGEVVGGMVDVYSKKKEPVRVPFDAEKINKLLGTDISKEEMIGYFKKIDLEFDEETSEVIAPTFRHDLFRIADLAEEVARFYGYDNIPTTLPSGEATTGKLSFKLRVEQVARDIAEFCGFSQGMTYSFESPKVFDKLLIPEDSDLRKAIPIMNPLGEDYSIMRTSSLNGMLTSLATNYNRRNKDVKLYELANIYLPKALPLTELPDERVQFTLGMYGEGDFFTMKGVVEEFFDKVGLHKKEKYDPNAGKSFLHPGRQANIIYDGVVVGYLGEVHPEVADNYGIGTRAYIAVIDMPEIVARATFDRKYTGIAKFPAVTRDISMVMPKEILVGQIEDVIESKGGEYLESYSLFDIYEGAQIKTGFKSVAYSIVFRAKDKTLEDADVSAAMDRILKALEGMGIELRKMMKEKLQNIKEEALKAIEAADMPEKLNDVRVKFLGKKGELTAVLKGMKDVAPEDRPKVGQMVNETRAAIEAVLEENKEKMEKAIRAEKLKKEVIDVTLPAKKNCVGHRHPNTIALEEVERVFTGMGYEVVEGPEIEYDEYNFRKLNIPDGHPAKDEQDTFYINKDIVLRTQTSPVQARIMEQGKLPICILSPGRVFRSDEVDATHSPSFHQIEGLIIDKNISFADLKGTLEVFAKELFGEDTKTKFRPHHFPFTEPSAEMDVSCFKCGGKGCRFCKGSGWIEILGCGMVHPHVLEMCGIDPEEYTGFAFGVGLERIALLKYEIDDMRLLYENDIRFLKQFMKKVKFLYDKVMEITEQVGKDHVGAYAAQAAYFFMLSLIPIILLLITLVQYTPVTKADVMTAVLQVFPKSVDSLITSIVNQVYNQSGGIISLTIIVALWSAGKGVLALTTGLNCVYDCKETRNYIILRIRATFYTVAFIIVIIFLLVLSVFGNTLNLFVTEHYPLMERFVDQIMQIRGIITPVLLFVFTMMIYKFLPNHIVQLKVQLMGAAFSAVGWMIVSWIFSVYLNIFKGFSSMYGSLTTIVLIMLWLYFCMYILLLGGEVNVILRDMEQEMRRRNKKHYSIYIAWILLLLCVIGGLKAGIEESAVGKEQTHSEISIQSRWEELLKSVSEKKNDKKKDQKKSESTEAAQKNIRILLMTDGYKQIVHKELKVSATGGLIIEKTGTREETAENEKITITKEDFGFQNGKIRVTAKDGGEMVVRSIRRGYGNPSYAGILDLYATSEGIVIINELPVESYLCKVVPSEMPASYQKEALKAQAVCARNYAERQMEDYAYPEYQAHVNDSTDYQVYNNSAQQDASTEAVRETASEVLKYKGNIVTTYYYSTSCGKTTTMKAWGTSENESNGYLQSVEVKDKNGDYEKLLPWYRWEADIDQDILSALLAENVKKNIGTVQSLEVTKTGPGGVALQIKAVGDKGSITVDTENKIRKALGGNGYEIKKQDGTVAQSGTLLPSAFFKVKKAGNIFKIIGGGYGHGIGMSQNGANEMAKTGKNYQEILQMFYPGTTIEKMAKIDLSKYGISGTTEIVHNPSYELLFEEETKPELEGFEKGQESELGAVNVMTGIYTGRSPKDKFIVVDENSKDTVWWTSDEYKNDNHPATQEAWKAVKDIAIKELSNKKLYVVDAFCGANKDTRMAIRFIVEVAWQAHFVTNMFIKPSEEELENFEPDFVVYNASKAKVENYKELGLNSETAVMFNITSKEQVIVNTWYGGEMKKGMFSMMNYFLPLKGMASMHCSANTDLNGENTAIFFGLSGTGKTTLSTDPKRLLIGDDEHGWDDNGVFNFEGGCYAKVINLDKESEPDIYNAIKRNALLENVTLDENGKIDFADKSVTENTRVSYPINHIENIVRPVSSAPAAKNVIFLSADAFGVLPPVSVLTPEQTQYYFLSGFTAKLAGTERGITEPTPTFSACFGQAFLELHPTKYAEELVKKMEKSGAKAYLVNTGWNGTGKRISIKDTRGIIDAILNGDIKNVPTKTIPYFNFEVPTELTGVDTGILDPRDTYADASEWEEKAKDLAARFIKNFAKYEGNEAGKALVSAGPQLMGLYYKSTRNSNLKVTASEAILKGLAPDGGLFVPSELPKLDVSMSDLKGKTYQEIAYLVMKQFLTDFTEEELKSCIDKAYDSKFDTEEIAPLVKVDDTYYMELFHGATIAFKDMALSILPHLMTTSAKKNDVKNEIVILTATSGDTGKAALAGFADVEGTRIIVFYPKNGVSKVQELQMVTQRGENVNVVAIHGNFDNAQSGVKAMFEDKELAEELAKKGYQFSSANSINIGRLVPQVVYYVNAYAKLLENEEIEDGEKINVVVPTGNFGNILAAYYAKQMGVPIDKLVCASNDNKVLFDFFQTGDYDRNREFILTTSPSMDILISSNLERLLYRISGDDDQKTKDMMEALKSTGKYTITEDMKARLDDFAAGYATEEECAQNIKKVYDKTGYVMDTHTSVASYVCECYQKNSGDNKKCVIASTASPYKFVKSVMSAIDPKYADQDEFSLLKVLEETSGREMPQAIKDILNANILHDLECDADKMKDTVKNILEVMKALGHVFKYGDNVDTDVIIPARYLNSFDAQELASHAMADIDPEFVNKVQPGDIIVANKNFGCGSSREHAPLCLKTAGVSCVIAETFARIFYRNAINIGLPIIECPEAAKAIEAGDEVEIDFDSGKIYDRTKGMEFQGQPFPEFMQKLIAAGGLVKYTNSKRKMGMTMTQKILAAHAGLDSVTAGQLIEAKLDVVMANDITGPMALPIFRQMADKVFDKDKVVLVPDHFTPNKDIKSAENSKSIREFAKNQGLSWYFEQGKSGVEHAILPEAGVVAAGECIIGADSHTCTYGALGAFSTGVGTTDIATGMAMGELWFKVPSAIKFVLTGKPGKYVSGKDIIIHIIGKIGVDGALYKSMEFTGDGIKNLSMADRFTMANMAIEAGAKNGIFPVDEKTEEYLKEHTKKEYKVYEADEDAEYESVVEIDLSEVRPTVAFPHLPGNAKTIDEIEAMEPIKIDQVVIGSCTNGRMEDMRKAAAILQGHTVHPDVRVMVVPATQKIYKQCIREGLLEIFVDAGCAVNTPSCGPCMGGHMGVMAAGEKCVSTTNRNFVGRMGHVDSLIYLASPEVAAASAIAGYIANPEKVGDKMKIDMHCHVREGSVDSRVSLDEYITTLKEKGFDGMLITDHDTYHGYRHWKYHMKGKVHEDFVVLKGIEYDTLDAGHIICIMPEGVKMRLLEVKGLPVSVLIDFVHRHGGILGPAHPCGEKYLSFTNTSRFYKSPELIKRFDFIEAFNACESAESNEGARKLAEKYKKPGIGGSDAHRPDCIGTGYTILPERVTCETELIALIRSKAAIEAGGVLYGKTAKDKMGPAHKILTYSFWFYNKGGALLKKHKRTLKGKIENPATPIDPIEIPYLHNIKKQKMINEENPTQTVISIYECDKKNTWCRKLKTASGIFYTEICNRNCYLQAGCIILTDQIKKDQIKKDIRKPGSSFVVIMENVTSVLKSADGPTSIFVAGKTPEIMGALIATVVVGVIIALFGLKIVRVLSALVGLAVGAVIGATVGVIAGFDMTKMLVAVAVCAVILCVMCAALRKFGIFIMTFFGSFGTFVTLLETKSVIVLAICAVIALIVAILTVIFAEFFVIFVTGIMGGVEAGMALPFVCGMTKIGWIGYVMSAAIAVIGIVVQTMMQSRKIGKKEKIFSKKIKEQVSMESEVEKARMLLDDGEPEESMEAAGDKEKTDNAEDTDKEETVTEIFDLDDTKPDEDNLDDDEDVVTVEKTDEPEDGFLDEDDVEIFETDDSDVVVFHPDDIDMATKKVTTATTKDVTAKVTAPETKTSEKAETVKKAETVKVVAAAEPKKIEKETEKKVAAPKAEPVNSIVKEEKAKPEEKKAEKKAEEKKTEPKAAEKKTAEKKVTAKKAEEKAPAKKTTAKKTTTKKTTAKKSTAKKEIKVSAFVEYYGKQVEEKEIIARVKKAWTSSGNKIGDIKTMDLYIKPEESAVYYVINGTSTGAVAFMEMLIDVFTDAAIDCIKMLPFLFLAFLLIEALEHYSSDFTKKLMIKVDKAGPVVGAVVGCVPQCGFSVMAANLYSGGIITIGTLIAVFLATSDEAILIIMGNPEHAGKIGILLLAKVIIAIVAGYLVDIFFKKEIAVPHHEGELCHDCGCHNHSSGIVKPALRHTGKIFLYLFVFTFILNLCIEVLGIDRISAMMLGDTVFQPVIAALIGLLPNCAASVILTQLYLSGAISFASVIAGLCTGAGIGLVVLFKVNPDKKENVKIIAVLYGIAVAAGLILEMFGVMDDYMHFVTPLCNQLYEEGKELLYMHFSGHPALLHTLQQAYQYPVDIMGGSRAEDIDYVVFVDSRAYYEFPYKRKPDIAHIIGDINHHFRKSNQNLLLFVPGRIGTSSPELGVPVSFAAINHFCAICEMSDSEVGYMPELSYGSHMFQDLVEAEIFYTALFDTPKTRIFNRTVFHDMPNILTEILPDCKEYEDIVKVCHTEGMHLKLYSDIQNSETVLGFESMTTHKIITIGRQFGSGGHEIGNLLATRLDIPLYDNNLVRMAAEKMDIREETAKAIDETSLNSFVSSYLITPMGYSSYINSEEYVQPLSEQMYELQTEIIKKLAERGPCVIVGRCADYILKDNPNCINVFICADRADRIKRIAERYDVSEKKALDRIKRMDRERKYYYETHTGQEWGSISSHEILLNASLLGIEGTVDILEGIYKRMHGSERREQIIRQIQESKAPVSGTKLASLYSVSRQVIVQDIALIRAAGYEIISTNRGYILNQPKTVCRIFKVQHTDEQLEEELNTIVDLGGCVDNVMIHHRVYGKMEAELALSSRRKVGAFMEDIRSGKSSPLKNITSNYHYHKVSADSEETLDLIEQELREKGFLVEERRQAVMNNITMTLQVDHLIMEALREDISSEDVTTNAVMHEAVTGEVDLICKQDGVIAGLQIFQRVFELLDKDTKVEFFCKDGDEVKNGQLMGKVTGDIRVLLSGERVALNYLQRMSGIASYTHSVASLLEGSKTKLLDTRKTTPNMRILEKYAVRVGGGYNHRYNLSDGVLLKDNHIGAAGSVTKAVQMAKEYAPFVRKIEVEVENLDMVKEAVEAGADIIMLDNMSTEEMQEAIRIIDGRAETECSGNVTKENISRLTSLGVDYISSGALTHSAPILDISLKHLHAVMKLNADTVIVGSGVAGLFSALNLPREQDIILITKSDLESSDSFLAQGGICVLRDESDYDSYFEDTMKAGHYENRKESVDIMIRNSRDIINDLVKYGVEFEKKDGEFAYTREGAHSRPRILFHEDVTGKEITSKLLAQVKKLENVKMYEYTEMTDVIIEDDKCVGIKAKNEKGTYEIYAENTILASGGIGGTYQHSTNFPHLTGDAIEIAKKHGIRLEHLDYVQIHPTTLYSKKPGRRFLISESVRGEGAVLYNKNKERFVDELLPRDVVTKAIREEMEKEGTDHVWLSMEHIPKETILKHFPNIYEHCLEEGYDVTKECIPVVPAQHYFMGGIWVDSDSRTSMEHLYAVGETSCNGVHGANRLASNSLLESLVFAKRAATKITKEETQEKISERKAVMIAASDQLKHYLHDRYEGRDMGMSGGGTFGYLFAFTIVLYLLIKHILHSNLLVTYKGSIGDSRHDVLNRKSRVKNKYNNCLVTCKMVEIDVMEVKMDLMEVMKENKTSMPQGLTMLERHVVIGLMDMEEMKVTRFPKDFLWGSASAAYQIEGGWKEDGKGVTNWDTFVRIPGKTYKATTGDVAVDHYHHYKEDIALMAEMGLKTYRFSISWARIYPEGRGTVNEKGLAFYQDIIDECLKYGIEPMVTIFHWDLPQALVDLYGGWESPEIIQDYVTYAKTLFENFGDKVKYWITLNEQNIFTSLGWLTAQHPPGKFDDQKTFYQVNHYAFMAHARAVLAYREMGGKGEIGASFAYVPSYALDCKPVNAMAKRDYDELKNFWWMDIYAYGRYPKAAMAYLKKKGYAPEILDEDMEILKKAAGEITFMGVNYYQSCVCEYNPMDGVTPYGTMNTTGVKGSAQELGMQGIYKNPVNPYLMTTDWDWTIDPMGLRFCCREITSRYGLPIVISENGLGAFDKKTEDDQIHDEYRIHYLEEHLKELGKAIEEGCEVLAYCTWSFTDLLSWLNGYQKRYGFVYVDREEEEGGTLNRYKKDSFYWYQGVIKSDGENLYKMDYESIAKKILQRVGGKENVISLVHCMTRLRFTLKDESIVDDEAVKKTKGVMGIMKKAGQYQIIIGNDVANVYAELNKLGNFSNEVPKKAPQNKEKQNVFSMLMDTISGIMAPVIPAIIGAAMIKVLLTLLPMIGVLSTKGDTYNLLSVMGDGAFFFMPVLIAISASKKFGTNMYYAASIALIMLHPNFISFMNSANDAKETVKFLKFIPVTYASYAYSVIPIILAVWSLKYVERLVDKITPVVTKNFLKPMLVVLIEAPIALIILGPLGAICGNVLSTVVYTIHDKLGFIAIGLVAGVYPFVVMAGMHHAFTPIKLGMIASTGFENFICIGELCSNMAQGAASLAVAVKSKNKDFKQIAGSSAFSALFAGITEPALYGVTLRLKRPMLGACIGAAAGGLFGGFFQMKCFGIATPAIVTIVQYVEKGKPQSLLFAALTILLTIVVAFIATMIIGFEDVVDENDDELDMLETESKEEVKVMENAIDIASPAEGKAISLSEVADATFAQEILGKGAAIVPEKGVIYAPFDGKVDVMFETGHAVGLVGENGVELLVHIGIDTVNLEGKYFSPKKAAGDVVKKGDVLIEFDIEKIKEAGYDVTTPVIVSNTDQYAIVEKTATGEVTKESNLIKVQMAVKIVRVLNTNAVVSSDQEGRELIITGAGIGFKKKKGENLDEALADKTYYLESVDDSRRLQEVVKEISEEYLEIVSRIVKTAREEGLKVRDSLYVTLTDHINSAVDRYRENIALKNMMKLEIRKFYPKEYEIGLRAVQWIQEQNDENLGEDEAAFIAMHIVSAELGSGSNVDVNKITKLINAVLQIVRIHFKIEFNEKSISYERFLTHLKFFATRVFDNTIYQDSMQEIYKVLIEENEYAYSGVRKIVEYIEKQYSYKLTIDERLYLLIHIKRILDEQSEMKSPLRKRLPRELKSEFGKYLVVFIMMAITIGFVSGFLVADGSMLRAYDDSFQKYNIEDGYFQTKKKLTPAQKEDIEKSDVKVYENFYIEQKLTNGSTIRFFKNRKEVDKVCLMNGKMPKKSGEIAVDRMYADNNELKVGDTVKSRKKTFRITGLVALSDYSALFQNNNDTMFDAVKFGVAIVTDKDFEALNQVKVQYNYAWIYDKKPATEKKEKKMAEDLMEDMADVVTIESFVPQYQNQSIHFTGDDMGSDRAMIVMLLYIVMAILAFVFGITISNTIRKEAGVIGTLRASGYTRRELILHYMALPVVITLIGALVGNILGYTVLKQVCAGMYYGSYSLPTYVTVWNAEAFWMTTVVPVIIMLVINYGILHYKLRLSPLKFIRRDLSSRKQKRAVHLSTKLGIFRRFRLRVIFQNISNYLVLFVGIIFANLLLFFGLLLPSVLNHYQEEIQENMLAKYQYMLEVPTDAISGSKLESLLSLMQYSNGTKTDNKTAEKFSAYALNTIPGEAKSEEVVLYGVEPDSKYIKADLGDGVYISTAYADKYQVEPGDKITLKEKYERKRYTFKVKGVYDYSGAISVFMSRDKLNETFDLGSDYYAGYFANTKIKDIDEKYIGSVVDLEALTKVSRQLDVSMGNMMGLVNGFAIMIYMIVIYLLSKIIIEKNAQSISMTKILGYTNGEISRLYIMSTMVVVVIELLLSLPIETVVMNVIFRVMMMESLTGWITLWIDPKIYVEMFLTGFITYGVVALLEYRKIKKVPMDEALKNVEMFLEIRGIKKSFGTGDSRVNVLKGLDLDIEKGEFCVLLGPSGSGKSTLLNIIGGIDGADEGSITIEGERLEDMTEKKLSLYRRKHLGYIFQMYNLIPNLTVRENIEVGAYLSDHPLDVDELLHTLGLYEHQKKLPNQLSGGQQQRTAIGRAIVKNPDILLCDEPTGALDYHTSKEILKLIETVNQRYGNTIIMVTHNDAIKDMADRVVKLRDGMIRKNYRNEVKIPAINLEWMVKAIKKFIKEYYDCVFGFLLFIIGSFLFFVVLVNRYYFSTWGVWRICLIGNILVQPGICLLVRRYMKLRYRNWSQKGSAETYLQDTEDSIYYQTWKAKEKQSEKRFRNILAVELSAAAAYLFFISYSSGWGWNYAAGYMMVATVFIEYICCREVIQRYWRNELDQIMEQTESFFQKRLEQALEIERKSLEKVSRSDQLRVDLITNVSHDLKTPLTSIVGYLELIKKEELSDVVRDYVDVISTRAGKLGEMINSLFLLAKASSGNVELHKETFELNRLMEQIFADMDDRIKESGLKFVTQFTEEDTAIYSDNSYFYRICQNLIENALKYSAKGTRVFVKTYKKEAGTDQKMVLEITNTSGYEMDFEKEDIIERFSRGDKARTSEGNGLGLAIVSTYAKALGGEFDIKIDCDQFKAIVSIMEAEKILVVDDNKEIVYSISELLKYEGYETLKAYDGMEALDIMERENVDLILLDVMMPRLNGLSALMKLREKSRIPVIILSAKTEESDKVSGLTLGADDYIEKPYNPAELIARVKAHLRRYRAWSGGETEKKKDPDQIVNGGLVLDKKQRVIFVEGEEVHLTATEYKILELLMAHPGQVFPAEQIYENVWQETADYTVENTVMVHIRHIREKVEIDAKKPRYVKVVWGIGYKMEKYGKSNMSEKSMSKDTRKNVILLHIAVMCFSCSGVIGQYVQVPAVQVAMGRVICSSLLLLAISLVCKDKLTLDSKKDYGLMILTGVVMAIHWSSFFQSIQTSSVAIGTITFSTFPLFLTFLEPLLFHEKIRGKNILNALILLMGVLITIPEFSVENKVTSGILWGMLASFTYAVMTLSNRYFSSRYKGRTICLYEQGTAAIALLPALVLVKAEWRPVDFAGVATIGFLCTAIAYSLYVTAQKGVKAQTAGIISGMETVYGIVFALIFLREIPTVRELVGGAVILGIAFYSSLHSEDMNHLLKGRKVIPLTDPEADVTYHLICRKEKEELVKNYKMVKQKTPAQVALRFLIQSGVVVIPKSVHKERMEENFNVFDFTLSEEDMKTLEALDGGESLFFSHHDPATVEWFMSIVMELRVLKYFLMAAREENITRTAKLLHITQPTLSRQLMRPDLAQKRSTVRDRKKIPGCILRKKNMIMKQDDMEKEKKKCSGTYLEDSHPDIYPESVKEESGYYVATKKKQGEYTIEDYRKLPEDESAELIDGTIYDMVAPLSVHQLLASKIYSSLVGYIEKNQGACIPMFAPVDVQLDQDDKTMVQPDLMIVCDRKKLTRQGVFGAPDFIIEILSESTRKKDSYLKLMKYQKAGVREYWLVDPDKKKVIVYDLEKVEIPVIYGFTDQVPVRIFDGKCVVDFSLIYENIKFIYEQSMTKEEWYQQLFSRLEQSKFRNSFHLKEKDKAYIREKGMDTIRRHAEDFIAKREAPAVIPNDGKQTPMRGHPVFIAQHATATCCRGCIYKWHKMRPGKELSKVQQEYLVDVIMTWIEGEMKRMSNTNPFWKITSNQEVTVNEQNPQAVGFYEHLGFQTYKRTECDEEGNPYPLLYMKRNICMENNEQDFINIINATENNLKHVSLKIPKKQITVFTGVSGSGKSSLCLDTIAAESRRELNVTFPSFVQQFLPKYGRPEVDRMENLPVTIVIDQKKPAANSRSTVGTYTDIYALLRLLFSRVGKPFVGYSDSFSFNHPSGKCERCEGLGVVTELDIHKLVDFDKCLNDEGVIKWPAFTTGAWRWKRYAYSGLFDLNKKIKDYSKEEMDLFLYSPQIRLKNPPDNWPKSAKYEGIYPRMYRSIITSKEGQLHKKELDRIVSTFTCPVCHGARLNAKIRSCLINGKNICEVSDMPIPEAAEFIRQIEDPLARDIKTEILKRMNALTEIGLGYLSLSRGTDTLSGGEAQRIKIARYINSPLTDMMYVLDEPSVGLHSRDIQKLKNSLIKLKEHGNTVLIVEHHREIIALADHIVDMGPEAGINGGQIMYQGSYEGLLKADTVTGRMLRTKTPVKMEYRKPTGWYQLEHANLHNLKNVNVKLPLGVMTVIAGVAGSGKSSLMEYFTSQYPGEVISIRQKDIGINLRSTPATYLDIADKIRALFAKENHIARSYFSFNSKGACPVCQGKGVIISDMAYMDSIETVCEVCHGTRYSEEVLKYQYKGKNIAEVMNMTVRQAIRFFENTDFVNKLDMLEQVGLGYLHLNQSMTTLSGGELQRVKLADKLEERGQIFILDEPTDGLHLDDIRRLMKLFNKMTDQGNTLFIIEHSLDVMKDADYIVELGPEGGQAGGEILFTGTPKEMLESSGSVTREYLSDMIRKLLNGDVDRVADIWLKTNLKAHYFISNRYWTSNYELVKEMVSQSEVYVFEADKMIQGFVGLNDEYIEGIFVAEEMRSCGIGKLLLDYIKDKKVRLQLNVYQKNTRAISFYQREGFIIQCEGLDEATGEKEYTMLWKQKMANDITVKHGWILPLFVSLYITKRSEAVLQWGKRKNIKKLIINGELVIEWKKEKSIKDVVGENICYDMESVNYEYFDSENDYSKNPNATKHRSFNVSRGDFSKYAILNGFYGKKLISRDARKFYSSMCRMAVKKEKGFYVISDEYEFAETSYKNVISFAMGMLATRIIANEIYNINKLYHFTDKSFKGTLVNGKMAPDWIGVDGQKKVFLFESKGTCNKNVRKKTIEHAKVQLNNVGSIKDTSTNQMYYPQKDSKHVICSCFDAYSGIDKVWNIHDVDPEGKGEVNLEINFDKECFMYYQAFVSYVDSLNQVYQCESVKNQKYYCWVYEDEKYCILEEIYNSMKSGQFNEQNRYRNFNNYVNEKLSDIEYPEQFSHDGISSYEDGIVVCSSVSWRDKLHMQDDTLYNMTDNTEYQANLFAADLLIEDEEIEDMVQNEDLDYFGLCSSLNATPELMSFKLYSLTKRGQAYHMPMEIQSNFLAKMQSEVNQEENLNRIITVPNLLSFFRLCLIPVIIWSYCVKKNPLLAGEILLLSGLTDLADGYIARRFHMISNLGKILDPVADKLTQAAMLICLFTRFPHMLLLIVTMAGKELYMAVSGCLVIRKTGKVHGADWHGKIVTFLLYGTAAVHIIWFHITPMVSDLLIGLCAIMMVISVALYIIQNTRTLKGETVMTFYQELQLNQAGSKNLLKKSETVKEKSYHILVYLVKIAVTMAFCFLFVTIFSILFGNENSIVGVVVLLCLMVFRNADLGIHTGQSTMLLALFFVIMTVCPHLANQFSPVLGMLLNIAALAVLILFGCHNPFMFNQSTLVLGYLLLYGYDVTGKSYQMRLVGMALGAALTCFVFYRNHKNRTYKRNLKDLIQEFDITSSRTKWQICQILCVPIVLCIAELCNMPRAMWAGIAAMSAILPFMEDMHYRVRKRIVGNIAGVICFTVLYFLLPSSIYAYIGILGGIGVGLSAQYGWQAVFNTFGALAIAAETYGLQGAVSLRVIQNVFGVVFALAFCVIFYWFMSKKKESEATVHAEMEQKKEKGLRIRSCLTGAIWLALVFSTVISALLFAFLNHFFNLPGSIPVLGWLLIFNTLIAGLITSFINAKLLEPITRLSKAMKEVSRGDFEQHLETNSRIAEVGESYQSFNVMTKELRATEVLQMDFVSNVSHEFKTPINAIEGYTMLLQGEELSPDQEEYVEKILFNTQRLSGLVGNILLLSKLENQNIPMKKTEYRLDEQIRQAFLSLETKWTEKEIGFQVELEEVKYTGNEGLFMHIWINLLDNAIKFSPSKGTITMFLKQEQDSVKFILEDEGPGIEDDVKSRIFDKFYQVDGSHKAEGNGLGLALVKRIVDSAGGTIKAENREYGGCRFVVELPIQKDEAIMFQILIVEDDKELSQLFQKVLEKNGYQVKSASDGAQALEVLDKEYIDLIISDIMMPVMDGYELVSELRSAGYQIPVLMITAKGSFDDMRQGFLSGSDDYMVKPVNVNEMVLRVGALLRRAQILNEHKIVIGSTEFDYDAMTVTTDKESLVLPKKEFLLLYKLATSPGRTFTKQQLMDEVWGYETEADPHTIEVHIGRIRERFKDNPDFEIVTMRGIGYKVVKKMKKHKICKILLVILAIFLCVAFYELLGICVAYKKQPEVSNTTKKETKNGSWNECSENTERAVIIEKNPEALLQRVRLIKNAKKEIILSTFAFQSDESGKLILGALHDAADRGVHIRLLVDGMESWIDMEGNPYFYGLSSHENVEIKLYNKANPLKPWKMMGRMHDKYLIADGKRYILGGRNTYNYFLGDFPGHKNYDRDVLVVCDEPEKENSVNQLSEYFETIWNQEDSDYFHDNKKLANRKSVKNAVLELQNGYQKYFEENKERICDTDYTDETFETEKIALVSNPIHTGSKEPVVWYQLGELMKNAKNRVKIHTPYIICNDMMYNTWEEIAENVSDFSIMTNSVANNGNPFGSADYAKNRNRILSTGINIWEYEGGYSYHGKSILIDDDLSVIGSFNMDMRSAYLDTELMLVIRSKDINKQLEEGMMEYERVSRQVLEDGTYRDPYHVEPIELTKKRQRKIFLVQHLLGWARYLFMKQDTLEGKAKTKNGVKRLCFSIICILLEVIFIITIVTRLNEYAEIINLFTRILSGILVLGLYASNKTSSMKMPWVILILIFPIMGVGLYLLIGLNGGTHKMRERYAEIDSKLLPMLPDSQECLSKIKEKIPKAGNIASYIQRNSQYPIYQNTDIVYFDEAVKGLEAQLKDLEKAQKFIFMEYHAIEDAEAWHKIQDVLEERVKAGVEVRVFYDDMGSIGFINTDFVKKMEAIGIHCRVFNPFMPGLNLFLNNRDHRKITVIDGKVGFTGGYNLANEYFNYTHPYGQWKDTGIRLEGDAVQSLTVTFLEMWNAVSDKDANDSDFSKYLFHYDYAAQQTGFVQPYADSPMDNEQVGEEVYISMINKAEKYCWFMTPYLIITDEMTHALCLAAKRGVDVRIITPGIPDKKFIYNITRSFYHGLVKHGVRVYEWTPGFCHAKMSVADDCMATCGTINLDYRSLYHHFENGCFMADCQAVVEIKNDLIRTMGECRDVTDQYQTGRSAYLRLGQLFMRLFAGLLMTKDEVKKLRMNSPESLQFLNNATKFYNLMMMYRCAIREIQTKLEVLDDEFSVENNRNPISFIKTRIKQPNSIYDKLQKMGYEFTTENIQTYLNDVAGVRIVCAFIDDIYMISDLITQQDDIKVIEIKDYIKNPKSNGYRSYHMIVEIPVFFAKGKTPMRVELQIRTNGMDFWATLEHQLRYKKGIEEMPGYDEISEELLHSARAIIEADNEMQRIKDKIGMFHEIMCTAATYKTKDFYFGRTLDYEFSYGDQIVITPRNYAFNFRHVGDMKNHYAIIGMAHVAEDYPLYYDAMNEKGVAMAGLNFVGNAVYAAIKPDVENIAQFEFIPWILSQCSSLVEVRELLERINIVNTPFSEQLPLAQLHWIISDENESITVESMSDGLHIYDNPVGVLTNNPPFPQQMFQLNNYMYLSPKQPRNTFCENLALDAYSRGMGGLGLPGDLSSSSRFVRVAFTKVNAISGESEEESVSQFFHILGSVDQQRGCCEVADGKYEITLYTSCCNVTKGIYYYNTYENHQISAVDMHVENLDSDKMICYPVIQGERINYQNKMSENKDYIQLPPLKKDTPSDVVAFIWEYMKVLENSREKVKNLLKDANENGVKLSHQAPTLYDVVPKKEIAEFEELMRKTIADIVSEASSVACWVYVQKYVKHKTLNEMLQELPDVGQFILAMDIWFAKLMEKMFILKLAGKILLLSVWLILFVIGLAVKMTVQTYAVVRGILGFIFTLLIIATAYCYHDWVQVAFLFSLSVILYLILFAGVFVDTVLDMTRERIIDFIISMEKKMTFNYFYGTEADQFSFYRIPKALFTDSYFKDLSSDAKILYGLMLDRMSLSIKNQWFDDKNRAYIYFSIEDIMELLNCGRNKAIKSMRELDDETGIGLIEKRRQGFGKVNVIYVKTFMPEKTDEKKFGEESQKFKKQTSVENEESTEVYNSNFMKSKNQTSRGPENKLQEVYISNPNNTNLSDTEMNDNKSNQIVSADENRSDGDNRSEDYQAYENLVKETIDYESLEVTHHDDMRQVDEIVNLIVETVMCKNDKILIASNWYPASLVKKKFLMLTYSHIEYVLHCMSGNTTKVKNIKKYLLAALFNAPSTMNGYYQAEVNHDMPGLVRMCKVISVVNQKGGVGKTTTTVNVGIGLAREGKKVLLIDADPQGSLTASLGYEEPDDLRITLATIMMDVINEEEISLEDGILHHQENVDLLPANIELSALEVTMGNVMSREMIMKEYIDAIRCRYDYILIDCINQIQMLSIFNNCVMAKKVSRSLTFSEKKLTKYFLDDYTAKDMEQVIESLLEKWMQEQSCMTEPNRQSGENEERIIEIEIKRLRPFKEHPFQVKDDKEMFLLQESIEKYGILNPLIVRPVPDGYYEIISGHRRKHAAEKLGYRKVPVIIRVLSEDDSILSMVDSNLHRERISYSEKAFAYKLKNDVLKRKSGRKKSQVDHKTPRKRAIEIISEDCGDSPKQVQRYISLTKLIPEMLQKLDDEIISFCPAVEIAALSEKEQRELLVAMEYAQAIPSLSQAQRIRQLSKEKQLSLEKMEEIMCEVKKGEITRVAFTNEQLHKYFPNSYTPAMMKREILALLKLWKKESWESMNKLVKRLLTGTLAFATILTALPVTAVHASGNQYWTESAERVGYIEHVMNDGSIKSTFNEGHMKVEGETAYCVDINTNFKNGYKTRSDASTRMSSDQIADVALSLEYVKQYTATHTGLNNNQKYLLEQCVVWQRLSEQLGWQCDNVRASYNEISQAVQNEVYAGAKAFVKANKGRYECGGYIYTGEGQDIGQFWAKLNVGNAKVKKTSSNPTVTDGNANYSFESATFGVYSDKGCNSQLATLTADGNGDTKEVEVKAGTVYIKELSAPKGYKLDSTVHALNVEVGKTATLTVADTPKVTETLIDLFKIDMETGKSSPQGTASLEGAEFTWSYYDGYYNADNLPAKATRTWTTKTVAEKDSDGTIHYVSRLADSYKVSGDSFYTQDGKNVLPLGTLTVTETKAPNGYLLDGAYMQADGSSEQIKGTYLTQISEDGELAVLSGSNQYSVSDKVIRGGVKIQKRDLETKDTKAQGSATLQYTEFNIISLNDSPVLVVGKLYNKNETVKKIQTGIDGIASTSADLLPYGNYRLEESKAPEGYLTDGAKAIDFSITEDGKIVDLTDKSHSVYNQIKRGDIEGVKIGAGTHKRLAGVPFRITSKTTGESHIVVTDKNGQFSTASSWASHKVNTNAGKSSEDGVWFGTSEPDDSKGALLYDTYVIEELKCDSNAGFKLIPAFEVVVSRNKVTVDLGTLTDEYEKEITIHTTATDKKTGEKMIVAGKAIKIVDKVTLDGLETGRKYKLSGWQMLKEENAELLIDGKRVDSDYTFTADSEKMTVEITYSFDGSALGGQNLVTFEELYDMSNPKEPVKVAEHKDINDDGQTVLITERIIKIHTTATDKNGKKEIEAGKDVTIVDKVTLDGLEVGTKYKLSGWQMLKKENAKLLIDGKKVSNDYEFTADNEKMTVEIAFTFDGSFLGGKSLVTFEELYDMTNPDEPKKVTEHKDITDDGQTVTIKEVPEVPDTPKDTDTPDTPSTITKTSDSPKTGDNTNIYAYLVMLGLSCVGLGGMLYFKRRRKKSMELRFVVPNMEETFGNLEFAGENTTEQQRINGRMAVITRSYNLYSDVQRADDVVVTLPAKAGEKHFSPEQKVKLINPRITTDGYKIGERGFVNYILLADDMLPAESKMRLANGIVIDKEKTFGVLKFSALRREVHVQNEDGTVSEEIKERTYDLKCNTQGRMIQVSVPATVPLKDYDYNAEVELINPVADTVANANYRGADVDWYVKADDIVPKNKGTHAGNSQNNAPQQPPKKMEFRKDLGQYVYEYEGLLFAWDEEPEEDIQNTVESLAENYFKNLDVIIDFMLSDIKEIYGEVTVEDVKEKLGKPVIDYNNGKVTYYEQSFDDCHIFEFEFMDDAFEDLQYFSIDGMNFIDKALSEITNGEDFVQAMADIYEHSEARSELRKFPSWIRNIITVIDYDTELSMNGLDFKSYKNVIEALNDIGLIEEAEALIAFERDSSQEGADICYSKLALNNDYEAFWNKVYSYADENIKKMKVWKKPKGNRIRASDKSLVYHFCIGWLLLLFVAVFLLLNLRQLLVTDWKDFNLLHAGITWTAYNSITVLIAIGVCALVVFLYYRYGYDRIKRLLHRQKLARMVLENKWYEAENTKDSVFFTDLQSRSREKIVWFPKIYYQMDNGLLHILCEITMGKYQEQLLSLEDKLESGLYCELTDKTLHDGYIEYTLLYDMIANRISIDEVIAENGGLRLMKNLVWEYDSLPHALICGGTGGGKTYFLLTIIEALLRTNADLYILDPKNADLADLGTVMGNVYHTKDDMIDCVNAFYEGMVTRSEEMKLHPNYRTGENYAYLGLAPQFLIFDEYVAFLEMLTTKESTALLSQLKKIVMLGRQAGYFLIVACQRPDAKYFGDGIRDNFNFRVGLGRMSELGYGMLFGSDVKKQFFQKRIKGRGYCDVGTSVISEFYTPLVPKGYDFLGTIGELAERRAEKKALEQSEALLMTVYMDLENLLKEKNISKNKVCEACNLQRTQLNNYCKNKVTRIDFSILAKLCEYLDCTPNDILKLKMIRKRTIIIVITILLLLAGILFYLQWGRQMDVSSSSGSGSDNHYELRVSVILNALVVTDQQKCAEQIFEKCRDNSFHSVRFSYDIQIPHALSVTVYKNQKDAESGNSAFRFSYQQENQIDGSYNIVDNPEKFTLEMEMSQFFRKGGIALNDTEWIQDFADRRLQYGVSQTKLAVMAGISREHLSRIESGKVAVTEEMKVKLLEALEKFNPEAPLTMLFDYVRIRFPTLDIGHIIKDILQLNIQYMIHEDFGHYSYTEHYYIGDIFVYTSPDEEKGVLLELKGKGCRQFESYLLAQERSWYDFLMDALVDGGVMKRLDLAVNDHTGMLDIPELTEKCRNEECVSVFRSFKSYASGELVKHEEQDKAGMGYTLYIGSLKSEVYFCVYEKSYEQYIKLGIPIEEAPIKNRFEIRLKNERAYYAVRDLLTYYDAERTAFSIINRYVRFVDKEADKKRSDWKLSVRWAWFIGENREPLKLTTKPEPYTLDRTLRWIQRQVDPTLKMLETITAKTGVDYLKEIRKSTKLTEKHYKIIEQQTTSTEDVILEKENMQRLLFDFLLFSLGGTVGVIAMCILQAGRQSDRKMMELKGEKKMNFGQNLYNWFLSNAQSLVLMAIVVIGIYLGFKREFSKLIGFLVVALIAVGLVFNASGVKDVLLQLFNKIIGAMVRYSIEIGQKEQDILKEIVLASDKNVKKRKFATGLSSVMAVIMLIYTILCFMNSRIGYGIIGLLFSVFFIWIIINGANTFQKKVINIVHSKMDNKLTSGKREYCFDTDGVAVSSDIGNGTNHWNAFKCWGIFRNYIYIRTIKNEMVLVNQNDLSENDVKELKSLLSQNLKEETLMEECSVLIETTKSAEDKTSRWFDLPIDYELFRDLLGVEADSKDYQITDMKLPFAGDIVRTTSVRRLNKLYFAYTDLSPEVQQAYKELIPYCGGVEDLLQKSEEFLFYPECHNIMDVARYRLEHNIEFSALSEKGKKYFNLEAYAHELEEKGRYALCNNGMFKLMAEMKVFVINLDEQEKDTGCAWFTLPCNIEALKQSIGLPPDSDRYLISDYDFPFEILQDTDLDLLNNICLAISESEIPPEDIPAIQREWFSNLQELEAGLCNITYHRNCSDMEETSEHFLCVHGRFYEYNEMIDDMQVYIANLGKYNEGELVGDWFSFPLDEEVIAERIGLNAEYEEYAIHDTDNFPMEISEYISIEELNRIYEQLEELPDYLLDDLDSFISCYGSLEELVEHKDDIILYSGCETMTDLAYYLIDEEQVLGEIPSSLQNYIDYEAYGRDLDIEGTFIATNAGICEVLRMKKIRSYTSIWNVEKVLYAINDVNLPFPVTFTQITWFVLTEFIIILFADVPPLSMIEGAFLKYFGIPVALTWFMSQKTFDGKKPYSYIKTMVLYALRPKVTYAGKAVNLHKQKFEETITAVRSVTYVPDMFPIKYIDNNLVWNKDNEVFAYYELIPYNYSFLSPEQKYLVHDSFRQLIAQSREGKIHALQIATESSIRSIQEQSKKLVTGKLREVAIQKIDDQTEALVSMIGDNQVDYRFFLGFKLMVTEDEVNLKNIKKSVFLTFREFLNEVRHTLMNDFVSMSNDEINRYMKMEKLLENKISRRFKIRRLEAKDFAYLMEHLYGRDGIAYEDYEYPLPKRKLKRETLIKYYDLIRPTRCVVEESQRYLRLEHEDSESYVSYFTVNAIVGELDFPSSEIFYFQQQQFTFPVDTSMNVEIVGNKKALTTVRNKKKELKDLDNHAYQAGNETSSNVVEALDSVDELETDLDQSKESMYKLSYVIRVSAPDLDELKRRCDEVKDFYDDLNVKLVRPAGDMMGLHGEFLPASKRYINDYIQYVKSDFLAGLGFGATQMLGENTGIYIGYSVDTGRNVYLQPSLASQGVKGTVTNALASAFVGSLGGGKSFCNNLLVYYSVLFGGQAVILDPKSERGNWKETLPEIAEEINIVNITSDSSNQGLLDPYVIMKDVKDAESLAIDILTFLTGISSRDGEKFPVLRKAVRTVSQNQNHGLLQVIEELRKEDTAVSRNIADHIESFTDYDFAQLLFSDGSVDNAISLDNQLNIIQVADLVLPDKDTTFEEYTTIELLSVSILIVISTFALDFIHSDRSIFKIVDLDEAWAFLNVAQGETLSNKLVRAGRAMNAGVYFVTQSSGDVSKESLKNNIGLKFAFRSTDTNEIKQTLEFFGLDSEDENNQKRLRDLENGQCLMQDLYGRVGVVQIHPVFVELLHAFDTRPPIKSEVDLEMMKSVTKEKVFHVLKLVLLSVTVTLVLLSLLGTVAHASGLVDDTVNADNLYSKYPLSNYQLDFYVDNSWSWLPWNWLDGIGKSVQYGLYCITNFVWTISLYLSNATGYVVQQAYKLDFINDMADSIGKSIQTLAGVTENGFSSSGFYVGFLLIIILTVGVYTAYTGLLKRETSKALHAVINFVVVFIVSASFIAYAPNYIQKINDFSSDISTASLDLGTKIMLHDSQSKGKDSVDLIRDSLFSIQVEKPWLLLQFGNSDTEEIGADRVEALVSASPSDEDGETRENVVKTEIEDNDNDNLTIPQVVNRLGMVFFLLIFNLGITIFIFLLTGMMLFSQILFIIYAMFLPVSFLLSMIPTYENMAKQAVVRVFNAIMTRAGITLIVTVAFSISSMFYNISTDYPFFMVAFLQIICFAGIYMKLGELMSMFSLNANDSQQIGRRIFRRPMVFMRHRARRMERRLARAVGTGSMVGAGAGAVAGSAYNHSRSTHKNTPARPQRNNDISVGSRVGSAVGAVMDTKNKVRDSASSLKENVKDLPTQAGYAVHSAKQKAKDNVSDFKRGVVEERENRQEQRTQKRNLHRENISQKKQELQKAQEARQTVHTNGSATVGATRSHERPVATPVPKPAQTDTVIKPDMKRPATSPVIKNAEVKAGKETVRTNIRQEQQVKSVARTNQPNIAETISNRKKTTVQKQVNQKQNRKTVTKQPEKGRKKMRLKRILIIGTIFPVLFSLVLFFGILISGEDDDSSNSYSPVYSGMNLSADVLKHQPMVEKYARENGISEYVNVLLAIIQVESGGTATDVMQSSESLGLPPNSLSTEESIKQGCKYFASLLSSCKSKGMTDINVVIQSYNYGGGYADYVAKNGKKHSFNLAENFAKNKSGGAKVTYTNPIAVSKNGGWRYNYGNMFYVELVNQYLTVKQFSNETVQTVMNEALKYQGWKYVYGGSNPNTSFDCSGLTQWCYGKAGISLPRTAQAQYDATQHIPLSQAQAGDLVFFHSTYNTSDYVTHVGIYVGNNQMYHAGNPIGYTDLTSAYWKQHIICAGRIKQMFKKKEKTEKAPKNKKVRTMKVGTHKKSVLLLWAVLLASTSFGVYKNFTAIDTHTVHEKEIIQLRLNDTNGIENFVKNFAKAYYSWDTSKEAIEARTTEISKYLTKELQDLNADTIRTDIPTSVTVTNVLVWNVEQSGMDDFTVAYEVDQQVKEGEQTQAVTENYTVTVHVDKDGAMVITQNPTLAPAVQKSKYEPKAQETDVSVSSDTVKDATAFLETFFKLYPTATEKELAYYVKDGVLAPVSGDYVFSELVNPVFTKDGDNLKVSVSVKYLDNKSKMTQISQYELVLHKDDNWKIVEMGLFGKSKKEREKEYMNRLDVPLCLKEDFELIIDDVFTIMGVGTVVTGNISTGMCREGENACVYKTNGGVLETIITNIDIHTKERKSNGCGYKTEHVGLGLRGVSKEQLEKGDRVIVKNANMYGMMTEIQIAWLELMTVGGLGVILVLLGVTFNIIVKRQNQLCTKQTDGIVKQYGFPGNGRVYPIVEYFVNGTCYKTKKKFRGIKTTQISGVPVPVKSEVYEDEKGWLHVKTGSIANLRQLAEQLWPINSKMTVYYNPNNPKKCYVDRPISKSFTSMMFIIMGIVTILLSVLVFFLMQLMINNKEKKMIQRYCIYPKIAVVALIFSFVQCALIVPLEMIDDLVFQNKGFQPTGMFTALGFVIIYVIIFCFCALAPKFGMNGKKWKSLIGRLNVKQSETDYSKEVSAALASQAVGRFLKESDNDTAKNIGSAMQVAGAVSTVSTSIDMLSEAGSNAENMAHAYRIPIPDIKKQLIAFAVIPILIVVGTYIPQYIKGKQAMDQRIAASAKQVEIVKKALEPVCVRVHADNPNESRRSRSSYTVMGYLRDSGATDCYVHVQVNNSGTIINISYVEGVDINKSLEENLMQTEKDFATLQKSFENLNVSVSNPEILSYQAIPQQFKDEFLNGTFYKSFRFYDQDAPISLSCSFDTETEDQFDEYTRPKIDFFLGSKMTKEQIIEELKKSAKPYEEYYLDDEILSAMLSYQNPYEFVEPILEIISTNPSVDFGMPGDLVHFVEKFYKKGYEELLIDSVKKNPTSHNILMLHRCYNDIKNPNRNEFAKVVKALKNDKSVSIEIKDIIDEYDWDMLGIKKRDTKQVFKAIAHQQGVSVSEVKERIQSTIDEMYYSDDPDVQAEFSSYFGKKRPTPEEYVYTMATKIKYMKPSDFQKTVMCRFDSCLKKTVFGVVKDYYKELKKNQAEAIPFCELPDIIIDKVAIWDTYKTDYTTFNICGHDIYVYDDELAKVIKQLSDRYRENVLMYYFLDMSDTEIAKLQNISRSGVFQNRHYALKQMKKSLEEENMKQKRSYKKPSFYVISSAMDGDKISIDKILDFYDPYISKSCIRPLYDEYGNVYIAVDMELKGRIREAIMKMILEFDIKIEMISDTSNTETPKKEKKTYTVEEIAEQLCVSKKVAYALVKSGQFAYVRAGRAIRVSKDSFDKWLNQNMASIKKRKSTFSVIYWYLDNAGERKQKWDTLETKKEAKQRKAFVEYYQEKYGYVIVPLEEQFARQIDESKKELDSTDEDITLCDFLKIFVNLYGTSKWSPSTFSSKVGTIENYINPLIGDWKLNEITTKKLSAYYNDLLSVPEVPRANRKATGRCVQPANIKKIHDIIRCALNQAIRWEYIDTNKRNPASLATLPKVPKVKRKVWSVDTFREAIQQSDDDLLTICMHLAFSCSMRIGEITGLTWEDVVIDEQSIATNNARVIINKELSRVNAQAMQKLKEKDIIKIFPTQKPHCTTRLVLKTPKTETSNRTVWLPKTVAELLVQYQKDQKELQEFLGDAYNNYNLVIALENGNPVESRIVRDRFQKLCEQNGYEQVVFHSLRHLSTGYKLKMTNGDVKSVQGDTGHAEAEMVTDVYSEIIDEDRRYNAQKMDEQFYSTLNHDSEMQPQNEEVQPENNGLSDSDMELLQLLKSLTPEMKAMLLKQSASKMHQYMKSIGFGNIRDKKQLTQILKDVEESYTQHQLVTQDETTDLCEFEKEYGEGIGIKVCGDMDIDEQFEYRYYTPYFKGSGVTSYADVSVERRIDREAYVGICEDTKVGINLVFYLQNMMEYLRERQLGGRSIKYSSVTLSGLCNEGTILLPVLKSKEQEREQQEDVHNRMLLLSAAKSGDPQAIESLTLDDIDTYSKVSRRLISEDVFTIVDTYIMPYGIECDRYSIMGEILEYRLTRNEITREDICIMKLDVNGLLFDVCVPKREVMGEPAVGRRFKGNVWLQGRINFMLDIKFVRNNPDVVKQNIKNKFQDEKLPLVDEVIELDQKNRDIKGEVEALRAEKNKISKQIGACMAQGKKEEAEELKRKVAESAARIEELSKEEKEVEEKLKQNMMIIPNIIDPSVPIGKDDSQNVEIEKFGEPFVPDFEIPYHTEIMEAFDGIDLESAGRVAGNGFYYLMGDIARIHSSVLAYARDFMINRGFTYCVPPFMIRSNVVTGVMSFAEMDSMMYKIEGEDLYLIGTSEHSMIGKFIDTMLEEKQLPQTLTSYSPCFRKEKGAHGIEERGVYRIHQFEKQEMIVVCKPEESKIWYDKLWQNTVDLFRSLDIPVRTLECCSGDLADLKVKSCDVEAWSPRQKKYFEVGSCSNLGDAQARRLGIRVKGEDGTKYFAHTLNNTVVAPPRMLIAFLENNLQEDGSVKIPKALQPYMGGTEKLVPKKMDSKILKALGIDPALIFIFLLILIVILFVLYVNVTMKYNRLKSSYTTFMRGKDGKTLEESMMSGFSDVEAILKYTKQNRTDIQKLNKKMEKSYQKLGIVKYDAFNEMGGKLSFALAMLDNNNTGWIINAMHSREGCYTYVKEIVKGESYVELAEEEAEALDKAIFEDGYEEEVDKAVASATGSLKSVKSGPAKNGNQKSTNARNTKQTSGKANNGKILNARTSNVRPDMARPEKTRNERMPIKKKGLGKGLDSLIPDNKSMKSVTSEKTVESKEDAAAKSGVQVMKINEVEPNRDQPRKNFDEDALLELSDSIKQFGVLQPLLVRKRKDYYEIIAGERRWRAAKLAGVKEVPVIEKEYTDQEILEIGLIENIQRENLNPIEEAIAYKRLLEEFNLKQDEVAERVSKSRTAVTNSMRLLKLSDKVQQMIIDDMISTGHARALLAIDDPELQYTLANKIFDEKLSVRETEKLVKEIKNPKKPKEKKPVANSFIYQDLEEKMKSVFGTKVSIASKGKGKGKIEIEYYSDDELEHLFDMMMSIKRGEMGRVIAVANQKGGVGKTTTAINLSACLAEKGQKVLAIDMDPQGNMTSGLGIDKDEVEKNIYDLMIGQAGVDEVLQKEAIENLDVIPTSIDLSAAEIELIGVDDKEFIIRNAVQPIKDDYDYIIIDCPPSLSMLTINAMTTADSVLVPIQCEYYALEGLSQLIHTVELVKERLNPVLEIEGVVFTMYDARTNLSLQVVENVKENLQQNIYKTIIPRNIRLAEAPSYGMPINLYDPKSTGASAYQRLADEVMNREMNWKKTLLFISTAIGTTTLAFHVINKFIFNASDEHSEEDESNYYNWKFGNIYYKKEGTGSPVLLIHDLNHYSSSMEWDKVIGTLSKEHTVYTIDLLGCGKSDKPAITYTCYLYVQLLTDFIRDIIGEKTDIVATGASASFVTAACQNIADQIDHIILVCPESTHALAKAPNHKSKLLAKIINIPIYGTFIYNVGARNTALSDSAECKYLYASILGHYTTVNVAHCLEGLTTSIAVITGKNAPETSQKTTEYCHILPSIEHLEVPGSGLLPQRENVNAFLEQLDLLLSDNCMDQILKKSLEKIGIEITDEQKEQFDIYHKLLEEWNKVMNLTGITEYEEVVEKHYVDSLSIVKVMNMNHVDTVIDVGTGAGFPGLPLKIAFPHLKVTLLDSLNKRIKFLNTVIEELGLEDIHTIHGRAEDYAKDAAYREKYDLCVSRAVANLATLSEYCLPYVKVGGMFIPYKSGEIDEEVKGSKKAVKVLGGEIEDVVKFELPGTDIGRSFVKIHKVKNTAKKYPRKAGMPSREPIVMRYSANSVWENKDKYDVVVIGAGHAGCEAALATARLGFQTLVFTVSVDSIAMMPCNPNIGGSSKGHLVRELDALGGEMGKVIDRTFIQSKMLNKSKGPAVHSLRAQADKAVYSRTMRRVLEAQENLEIKQGEVANLLVEDGKITGVQTFSGATYHCKAVIICSGTYLKARCIYGDVSQYTGPNGLQAANHLTDCLKELGIKMYRFKTGTPARVDRKTVDFSKMEEQFGDERVVPFSFTTNPDDVQIDQASCWLTYTNETTHEIIRANLDRSPLYSGMIEGTGPRYCPSIEDKVVKFADKKRHQVFLEPEGLETDEMYIGGMSSSLPEDVQYAMYRSVPGLEHVKIVRNAYAIEYDCIDARQLKPSLEFRNISGLFSAGQFNGSSGYEEAAAQGLIAGINAARKLQGKESLVLDRSEAYIGVLIDDLVTKESHEPYRMMTSRAEYRLLLRQDNADQRLTEKGYEVGLISQERYDRLKEKERLIESEIERLKNAYVGTSEKVQELLESYESTPLNSGSSLAELIRRPELSYEAVTAIDVTRPELPKDLAAEVIEQVDISLKYDGYIQRQKRQVEQFKKMENKKIPEDMDYDAVNSLRIEAVQKLKEYRPVSIGQASRISGVSPADISVLLVYLSGNHRMEQLYNSTIAAISTAMSNSGIGIVRMSGPEAFQIADRVYKGKKEKKLCDQKSHTIHYGYIVDGEQVIDEVLVMLMRGPHSYTGEDTVEINCHGGVYVVKRILEVLIKNGARPAEPGEYTKRAFLNGRLDLSQAEAVGDLIASQNEYALQSSVSQLKGNIKDKISEMREKILYHTAFIETALDDPEHISVDGYGETLKKVVDEIMEAMKRLLDSCDDGRIIKEGVRTVILGKPNAGKSSLLNVLLGEDRAIVTDIAGTTRDVLEEHLNLKGISLNIMDTAGIRDTEDVVEKIGVDRAKEYADKADLILYVIDASRPLDENDAEILHLIKGKRAIILLNKSDLDMQVTKEQEELPEEFPVIEISAKNVQGIEELEDTLKEMFFQGELTFNDEIYITNVRQKTALQDAYAALERVNDSIAADMPEDFYSIDLMDAYEALGNITGETIGEDLVNEIFSKFCMGKMEDYITVSAKTLDDAITEALVQLGVTSDRLDYIVVEKGSEGFLGIGRKQAVIKARRKREEKPVEETVEESKVETPVKEEVKPEKKTEKKPAKEHSHTKKNVREEKPEVKSEPKKEVELAKVEPQTIETCEKFIYDVMNAMGMDDVKVTSVVDEEGALSINMEGSNMGILIGKRGQTLDSLQYLTNRVANKMQDGYVRVKLDTEDYRRRRKETLENLAKNIASKVKRTRKTVSLEPMNPYERRIIHSALQSDPAVSTHSEGEEPYRRVVVTLVRNRNNRMVPSLLTAANWPIVGQLCWILGKVMNFIYNFLDKCLPSDSGLVGLSIILYTIFVYTLLLPLTIKQQRTSKMSSVMNPEIQAIQKKYKNKKDQASMMKQQEEIQQVYDKYGTSMSAGCLPLLIQMPLLFALYPVIYNIQKYVPEIKTAPKAVNVFLTLPDLTISPMQMIKNSGSYGFPAIMIIITAILLPVLSGLTQYGSIKLSQAISGQQLDKDNPMASTMNTMNITMPLFSVFMVFSLPTGIGLYWIVSAVVRCVQQVFINKHLSKISVEEILEQNKEKAEEKRVKRGEKNERIAAMAQMNTKNMNNQNQKKRQSTSNLSEKEREAKVENAHKKAENAKKGSLASKANMVKKFNENDMKKILLTGIRFYQRYLSPIKGGSTCKFYPTCSQYAKEAIEKYGALKGGRLAVWRILRCNPFTRGGYDPVPMKYSESLKKNKDFQYIYRKGKSYANKYLVMYVLENGTSQNRLGISVSKKVGNSIVRHRLTRLIRESYRLQEERFRCGLDIIVIARIGAKGKDYKDIVGAMLHLGHLHKIIDEGMKMTFQPKKRQRAKVHGFRSRMSTAGGRKVLAARRAKGRKKLSAMMNTVKEKWPEIIEHLRVEHELSNVSFNTWIQPLKVYDVVDNTVFILVNMNASVEYIEKKYQLPLKVCIAEITGTEYEVVFISEDDDRLNEIQNMAIEANQKKKSKSAAEKAGLNPKYTFDTFVVGGNNNFAHAASLAVAESPGEVYNPLFLYGGVGLGKTHLMHSIAHFILDKNPKKKVLYVTSETFTNELIEALKNGKTAGNESAMSKFRDKYRNNDVLLIDDIQFIIGKESTQEEFFHTFNHLHTSGKQIIISSDKPPKDIETLEARLRTRFEWGLIADISSPNYETRMAILQKKIELDHLEKYNIPNDVLEYIATNVKTNIRELEGSLNKLIALYKLNNTGSIDIALAAEALKDIISSDNRREVTPELILDIVSEHFGVSIPDLKGNKRNAEIVFPRQIAMYLIRNMTETSLKAVGVILGGKDHSTIKHGIEKIENELKADETLSNTINIIKKKINPAMKITCSKSNLVKGVSIVSKAVPSKTTMPILECILIDATTDIIKLTANDMELGIQTEISGDIIDRGMIAIDAKIFSEIVRKLPDNEVTIETLDNLQTVITCEKAKFDIAGKPGDEFAYLPIIEKEDSIEVSQFTLKEVIRQTIFSISDSESNKLMTGELFDISDNILKVVSLDGHRISIRKVPLKKSVADRKLVVPGKTLIEISKILSGEAENVVSISYTKNHIVFEFDNTIVVSRLIEGEYFRIDQMLSNDYETKVRINKKELLNCIDRATLLVKEGDKKPIIINISDELMELKIKSQIGSMNEEIMITKEGKDLLIGFNPKFLIDALRVIDDEEVTIYLMNAKAPCFIKDDGESYIYLILPVNFNAAAMETIRLRDEYIKLGQALKATGMVESGVEAKEVIQEGLVMVNGETDTRRGRKLYGGDVVLFDGEEIRIEGMKVNSLKLKNFRNYDLLNVEFDGSTNIFYGNNAQGKTNILEAVYLSGTTKSHRGSKDRDMIRFGEDESHIETVVEKNGISYQIDMHLKKNSPKGIAINKMPIRKASELFGIVNLVFFSPEDLNIIKNGPAERRRFIDLELSQLDKVYLNNLSNYNRIVNQRNHLLKELSFGGKKDLSDTLEIWELQMVQYGERLIARRKEFVEQINGIIAKIHQRLTGGKESLKIIYEPSTGDLPFEQALNRYRERDLRMKSTTVGPHRDDIGFLIGDMDIRKYGSQGQQRTAALSLKLSEIELVKLATHDTPILLLDDVLSELDKHRQNYLLDSIHDIQTLITCTGVEDFVNHRFSINKVFHVQNGQVTKENMGTEKVQHEYGADEIQILEGLEAVRKRPGMYIGSTSARGLHHLVYEIVDNAVDEALAGFCDTIYVTINKDNSVTVIDNGRGIPVGINHKAGLPAVEVVFTVLHAGGKFGGGGYKVSGGLHGVGASVVNALSNWLEVEIYHEGKVYQQRYERGKVMEKLTVIGDCEEGKTGTKVTFLPDDTIFETTIFDFNVLKQRFREMAFLTKGLKIVLKDDREEEPKERTFHYEGGIKEFVTYLNRSATPLYEQIIYCEGMVNNVSVEVAMQHNDSYSDNTYGFVNNITTPEGGTHVVGFRNAITKTFNDYARKNKLLRDNEPNLSGEDIREGLTAIISVKIEDPQFEGQTKQKLGNSEARGAVDNVVSKQLEIFLEQNPAVGKIIVEKSVMSQRAREAARKARDLTRRKSALDNMALPGKLADCSDKNPENCEIYIVEGDSAGGSAKTARDRATQAILPLRGKILNVEKARLDKIYGNAEIKAMITAFGTGIHEDFDISKLRYHKIIIMTDADVDGAHISTLLLTFIYRFMPELIKQGYVYLAQPPLYKLEKNKKVWYAYSDEELSNIINEVGRDGNNKIQRYKGLGEMDAEQLWETTMDPEHRILLRVTMDDETTSELDLTFTTLMGDKVEPRREFIVENAKYVKNLDVMEDNIFDKVHEVDLKQTMETSYIDYAMSVIASRALPDVRDGLKPVQRRIMYSMIELNNGPDKPHRKCARIVGDTMGKYHPHGDSSIYGALVNMAQEWSTRYPLVDGHGNFGSVDGDGAAAMRYTEARLSKISMELTADINKNTVDFIPNFDETEKEPTVLPSRFPNLLVNGTSGIAVGMATNIPPHNLREVINAVVQIIDDQIEDKEETTIEEILKIIKGPDFPTGGMILGTRGIEEAYRTGRGKIRVRAVTDIETMPNGKSRIIVSELPYMVNKARLIEKIAELVRDKKIDGITDLSDQSSREGMRVVIELRRDANANVILNQLYKHTQLQDTFGVIMLALVGNEPKVMNLMEMLNYYLKHQEEVVTRRTQYELNKAEERAHILKGLLIALDNIDEVIKIIRGSQTVQIAKSELMERFGLTDVQSQAIVDMRLRALTGLEREKLEAEYKALMEQIEHLRAILADRKLLLGVIKEEILVIRDKYGDERRTSIGFDEFDISMEDLIPREDVVITMTKLGYIKRMSHDTFKAQNRGGKGIKGMQKLDEDYVEELFMTNTHHYLMFFTNTGRVYRMKAYEIPEASRTSRGTAIVNLLQLMPGEKISAVIPIEKYNDDEYLLMATKKGLIKKTPIKEYANVRKTGLAAITLREEDELIEVKYTDSDHDVFMVTKYGQCIRFNESDVRPTGRTSMGVRGMNLVDRDEVIGMQIDSQGTELLIVSEYGMGKRTSIDEFTAQNRGGKGVKCYKITEKTGNVVGVKAVDEDNEIMIINTEGIIIRMKCDGISELGRVTSGVKLINLPEGDKVACIAKVRRGDESEDDLVEPEESTEDAENVETEEMTTNVDLEKLQKDAVDIFNQGFACSESVIYAIKENFELDMSDDAIAMSSGFPWGLGGGGCICGALAGATMCIGYFFGRKTPGDPKVNRCFKLSNEIHDFFKEYCGATCCRVLTKGKEKNSPERKAQCTDFVAATVKKTAEIILRELAADEAEKMRIINVNTITQNIKDMCIKANHFLAEDMDQAMKHALDTEQSPLGRQILDQLQDNLKIAAEDMIPICQDTGMAVVFLKVGQDVHFEGGSLEDAVNEGVRQGYVEGFLRKSVVGDPIIRENTKDNTPAVIHYSIVPGDKVEIKVAPKGFGSENMSRVFMLKPADGIEGVKNAILTAVRDAGPNACPPMVVGVGIGGTFEKCALMAKEALTREAGSHSEIPWVKDLEEEMLDTVNKLGIGPGGLGGTTTALAVNVNTYPTHIAGLPVAVNICCHVNRHIIREVMEKHITAPITKETAKSLHAGDYVYVTGTIYTARDAAHKRMDEALDRGEELPIDIKNQAIYYMGPSPAREGRPIGSAGPTTASRMDKYAPRLLDLGQTAMIGKGKRSQAVIDAVVRNGCVYLAAIGGAGALLSKCIKSSEVVAYEDLGTEAIRKLQVENLPVIVVIDSEGNNLYETAIREYKKIMRRILLMVIRNILFVPVYWYKLCYHARHVEKYTEEEHYELLRYIDHRANTSGNINIKVYGQENIPDDNGFMFYPNHQGLYDVLAIMEACPRPFSVVAKKEVANVPFLKQVFECMKAYMIDREDVRQSLQVIVNVSNDVKAGKNFLIFPEGTRSKKGNQVQEFKGGSFKAATRAKCPIVPVALVNCFVPFDSKTTEQVDVQVHFLKPLLYDEYKDMKTTEIAAIVKERIQCTINSSLMGKENREVKSSVLVDLMYEDESAEENERSFYNALHEEQLPNNIEIKKLRVENVVYMNFKNDFSFKTRDQVLVLGEHQSTLNNNMPLRELMYIGRVLEQLIPIKDRYKKGQVHFPTPEFYTLYNGKDFMEKEKILKLSDAFETKSNDPMLELKVRVININPEAGHELLERCPIIREYSEFIEIIRKYQKKKDVEPYKHAIEECIEKGILADYLKRKGSEVVNMLTAEYDYETDIEVQRGEAYDEGREEGKLEEKKNLIKNLYEAKFTVAEISKLLKTKEDEVKKIINCMKIYKAKDYKDMSRKAANIISAQVIMKPNCVLGLATGSTPIGTYDQLVEWYNKGDLDFSEVTTVNLDEYKGLPRTNDQSYYYFMHQHLFDRVNIDPERTNVPNGMEPDAEKECGRYEELIRSLGGVDLQLLGLGHNGHIGFNEPGEAFEKETHCVDLTESTIEANKRFFASADDVPKQAYTMGIKTIMQAKKILIVVNGENKADIVERAFFGPVTPEVPASILQLHNDVTLVGDEAALAKIEIMIENKELLESAELFKIENLLWGTEKIAKTYGYIGFVPGEGLYIKLVCVEKNPLRIYKKDQDPVYKDSTMEAFFNLKEMIRQMKCSAEIQEEQWNVKQRNTNIMQRTDAMAYDKGNRPEGGFKRRGGGRRRKKVCVFCGKENNEIDYKDTAKLRKYISERGKILPRRITGNCAKHQRALTVAIKRARHIALMPYVQDMNKVILMGRLTRDPEVRYSQGENSTAIARYTLAVDRRFRRNNDGEQTADFIGCVAFGRSAEFAEKYFRQGLKVIVTGRIQTGSYTNKEGQKVYTTDVVVEDQEFAESKAVSDANAGSFRAAAPSPAPAPATPVSDAGDGFMNIPDGIDEELPFNMNKYELAVVVSAKIEDDERAQVIEKVKALVERFGGQISDVDEWGKKRLAYEIQKMKEAYYYFIHFESDAETPSEIEQRIRIMDNVIRFLCVRQDAMKKEYTYEVGDVVTMKKPHPCGSKEWEILRVGADFRLKCMGCGHQIMIARKLVKKNTKDLKKKAMRNENADNERKKHHRGRRRKKKGNIIANVILVIALIVFCVSGFQLFKIGKGYLDGRSEYDKVRKLAVTDDKNKNDKDKNHSEDGDDTFSVDFQKLLEINPDTIAWIRFPDEPSQINYPVVQGTDNSKYLKKTFSSNENTLGAIFLNVDNQKDFSDKNSVIYGHRMRDGSMFRHLQDYDTREFWKNNPYFYIYTVDGRILKYHIYSAGQVVDTSKSYQTTFETDEEYQKFLNMTQSTSLYNTGVEVTTADTIVTLSTCTSASDNHRFVVRGVKEEETKQMQKLTELIREDMKPALGVTEPGAIAFAVASAKKYTEGKIVNVHVALNSGMYKNAFTCGIPNSERFGNYYAAALGAVAADAEKGLESLADITPEDDEKAAQMVSDGLVEVVMDHVGSEITIDAVVTTENNRCKVMIRDAHTNIVKIEKDGIVIFETEDKMYREESRKKQARPVIHGYSLAEILRYVNTVPLEEIAFIEKAYTMNLELLKEGLASDRAVFAKKLYRENGNRIISRDALKTAQLLCNGAIEARVLGLSRPAMSITGSGAHGIIATMPLYAYRHANEDKTDDETLWRATALSYLITMYIKEYSGRLSAFCGCGIAAGTGMACGLAYLQGADGEKHTKVIQNMASGLTGMICDGGNHGCTMKGIVAVDAAFRATDMAMDDICIENIHGINGRTPEATMKYMGMIASPGMTGTEKTIVEIMESKKMKLKDRFIRFMYGRYGVDSFGKFTIWGSLILMLIAGWTHRGILSWLAWAGIIYSYFRMFSKNTYKRAAENQKYLQMTRGIRTFFYRQRNMITQRKTHHIYKCPSCKQKIRVPKGKGKIEIRCPKCNTRFIKRSMFGYISINKAEMKFKDYDVYHSYYCGLCKVLKECYGRRGQVTLSFDMTFLVILLTGLYEPDTKTEMVRCIAHPMQKHAAKTNEFTEYAAAINMLLSYYKCEDDWADEHRKKAFVAAKLLHSKIKKIEKLYPVKCKVISENLAQISKYEAENEQNLDLMSGLFGNIMAEIFAYRHDEWESSLRKIGFFLGKFIYLMDAYDDVEKDIKSGSYNPFKKAYLDDPAFADDCRSLLTLMMSECSREFEQLPILLHAEILRNVLYSGVWSRYTAVTSERLAGKNTHNAADTADGNSTAGRTTNDNPHPDTDNSTTGDQEQMTDPYSVLEVSRDASDEEIKKAYRNLSRKYHPDANINNPNKDQAEAKFKEVQQAYQQIMKEREYGSSGNYGPYSQNGYGPFRGFYGEYRQTGNAGNAGQESEQDLHLRAAANFINNGRYQEAMNVLNGINEHTAQWYYYSAIANSGLGNNATALQHAKEALRMEPANYQYQMLVNQFESGGSWYRQRQNPYTTTFGGGSDWCVKLCIANIVCNLCCSGGMCCGAPGGYSGGHYMMLDYLVLYQSESGNTKKIAASIFSRLPGNSKDLIDIDTDKTIPEANVYFIGFCVHRGSCSMEVSDFLSDLSGKQIALFGTCGMGDSPEYYKDIAGRVSAWIEADNDYLGYFICQGKMPQKVRMKYESMRTDENNDQIDRFIQNFDLALTHPDDLDVEHTKVFVDHMLKKIQLMVSSDFIGDSHASIFDARQGIQVNSHFFKVICFYDNEWGYTSQIFRLIEHMDRIDHNRMPVVSNASCTTNCLAPICKVLEDNYGIEYGLMSTIHAATAKQKVVDSRSQKDWRTGRSAFGNLIPSTTGAAKAISLVIPALKDKMSGIFRFYRRFTCIDLMKAIKNGKIVIIGAGHVGSHCGLSLMMQGLADEIVYIDIDKNKAVMQALDLDDMASNLDRDFTVRAGDYSDCADAHIVVMAAGKSRLPGQTRLDMFDDSIKMMNTIVGPLKESGFHGILISISNPADIIADFLRKRLGLPRSQVFSTGTSLDSARLRRMLSEITGVSRHSIQAYCMGEHGDSQFIPVSHIQIGGIPVKEYLSIHPEYRDKMDFDKISAEDKVCGFHIVEGKGCTEFGIGAVLSNIARAVMHDEKRILPVSVLLEGEYGEQGVPAGVPCVIGKNGVEEILEISLTEKEKEQLHNSCNVIRGFVEKADQMMLFILALLVLPVNRVHSVFCFLELQKAPQLSLKSFPSFKNLENGFFRSTFFGVEYSFFCTSHTIYHMKFTMNIVLIDRFYSINCVSHTIMIKYIYTLINIYQEDHTYGNMAIKLQSLYEAINNQFDVILHTNSFYDKEVTWIHTVEQGEFSHLLHGDELIFNSGLNFTSQDWLKEFLKSLKDAHASGLIISVKSRPAFSQEIIDYCNEIQLPLFSTSWDTPFIDIMRIFSEILLKNEHRETSLAAALKNAIYYPENEDSYLNPLESNGFFRDMNYTILMISCHTYDSDSGNSYLEQLEKKIRYFMSKGIVYEEGKHLIVLFAGESVNDISQKLYDVCQNNSDVYVGIGTTVSQLTDIHRSYETAFTAYQLTKTALPKNFLEYDKLGVYKLLADIHNQSLTADFLNSTLGPILDYDAVHHTDYLHILEVYFDHDCSIIHTANALYCHKNTLSYKLNKIKELLDYDILTNENRTNIMLSFYILRLEKRSIMDQNRIKRNQMLGAKIVKELTARNMEAYYTDSKEEALKKALELISEGSSISWGGSMSVNEIGLKEAVCQGNYHVYNRDTAPTPEDKRKIELAAYDCDYFLTSANAITEDGIMINIDGHSNRVSSIAAGPRNVLMIIGMNKVTRDVDSAMSRARNEAAPINAQRFNLSTPCCKTGACFDCKTPDTICCQILITRYSKTPQRIKVILVNEDLGFMKSLVLAEKPSVARDIARVLGCHKNISGAIEGSNYIVTWALGHLVTLADPEEYDKKFKAWDMSYLPMVPKKWELVVIKQTSKQYHNVKTQLFRKDVSEIIIATDAGREGELVARWILDKSGCHKPIRRLWISSVTDKAIKEGFAHLKDGRAYNDLYHAARSRAEADWLVGINATRALTCKYNAQLSCGRVQTPTLAMIAHREQQIRSFKPEDYYGLRCTTSVTGGSVGTMASIVTWTWQQKKSGSLRSFNKDLITGLDKKLKNQTLTVTDVHTSSKRTPSPGLYDLTELQRDANKRFGFSAKETLNIMQNLYEHHKVLTYPRTDSRYIGTDIVPTIKERLKACNIGPYKKYIPELLKKPLKTSKAFVDDKKVSDHHAIIPTEEYVQMEHMSNNERKIYDLVVRRFISVLYPAFEYEQTTLKAEAAGETFTAKGKVIKAAGWKAVYADAVSSGSSASQYDAYGDYEDSEDFGEDFQNNDMYLKASEQALPVLHKGDTLTVTRTNITSGKTKAPARFTEATLLSAMENPVRYMSSDDNKMKKTLGETGGLGTVATRADIIEKLFHSFLLEKKGNEILLTSKGKQLLELVPEDLKKPELTASWEMELAKIAKGAHKEQVFIKDIESYTKELIQDIKTSDGTFRHDNLTNTKCPHCGKRMLSVKGKNSRMLVCQDRECGYRETIARTSNARCPNCHKKMELIKKGDSETFVCSCGYKEKLEAFKNRRAKEGAGVSKRDVQKYLKKQQQQNDEPVNNAFAQALAGLKLDKMSKELMIERIEKAQKEIEAKRETVQQGKFRQDYHFMAETGWINDPNGLIYFKGKYHFFYQYNPYSGFWDCMHWGHAVSEDMIHWEYLPLALAPSEVYDDHLKGGCFSGSAIEHDGKLFLIYTGTCNNGNGFEQAQCIAYSEDGIHFEKYEGNPVITAPEGVPTDLFRDPKVWKHDDTYYVVCGASKNGFAQARLYKSTDMFHWEFVNVLAESRGEWGYMWECPDFYPVGDKYVLMFSPMGGKERTSVYLVGDFDYDTGKFFYTTSGEIDWGFDYYAPQSFLAPDGRRILVGWANAWDWMPFWKDWGPTYQEGWCGFFNIPREAVLAEDNTLKFVPVKELQDLRKNKQEEADILIKEDEKKELRSGCVYETEMRINLKKSTADKIRLNLRMSQGKKTEILFDLKRAEAYFDRNNSDGWSKGVARCPLNLMGKEHLDIHIYSDKISLEIFSNDYQNNFSCNIYNVDDDQKNEMTAIGGDLMIESIRSWELEKIMKMSNVSGLFKDLTTVKKARNGRLASWDQRGKNQDYWEIPAGETISLGEVEGPGCITHIWMTSSCRKVVAPSILDPVLNASAAPVMEIHPALGVIWDDYDPFYYRKVLIKITWDDQDTPSVLAPLGDFFCIGNSYPGNFSSLPFNVSLKPEEAGRYGAPCSVSCYFPMPFNKKAKIEIVNENELPFILYFNIDYEMYKEPLDENTAYFHASWHRENPCQGWGPDLQTNCPEVNNVTNFKGENNYTVLDVEGTGHYVGCNLTVKHYQGSWWGEGNDMFFIDGEEYPSLNGTGTEDYFNHAWGMQKNAYPFFGTIVHESDTDGFQVSYRFHITDPVRFEKHLKVTIEHGHANHLSDDWSSTAYWYQTLPTAKPITILPVEERIPNVPVLPERNLQMPELTEEMKAARESWAKRWEEYKPAREEQFRIKENKARRESKLNTEFAKKLREEYKMVPKRKKIAMYAAMIIITAIVVFPFLWMVLLSFKSSSEIMSNPLAMPKAFNLDNFKHALETLNFPQLYANTFVVCILSVVLELIITFCSSFVIARMEFKHPKAKSLLYGFLILGLSVSPFILLFPVYKINIFFGLKGKWALIFPYAASSISFNTLLLTAYLKQLPTEIDEAAVIDGCNIWQLMVKVILPMAKPVIATIVIFNVLYIWNEYPYASVMLKDVSDYTLSMGASFFKGNYTVDYGGIVASSLMIIVPELIFYGLFQKNIVEGMTAGAVKGMKIYHGGPGYKEDERMHWLSKKRYKIGLVIPTLVVYMVFIIIPIGMSIGYSFTKYSGIGKATFNGLTNYMRLFKDRLFWISLKNTMIMFILAFVLLLSLSFLIALLLNNKLKGVDFSKSLIFSPAIIAPIIVGIIWVYILDPNIGIINNVLDAIGASGLKQKWIGGNTLSPYSIAIIYFWQQLGYLVTVFIAGLKMIPGEVLEAVEIDGASFIQKTMYVTIPMMKSTISTVAVLIITGVFKIFEIVQQTTGGGPNHLSETLVTYSYSMTFNSGDYGYGMSLATFTFLLSLVITGIYSILTRERGEMKKKSLKKVTSAVLVAAMSMGLLAGCGGSKSSEEAKTDADGATVIKFGIHVANPKKQETVTYNIVQGFNKENKGKYKVEFVAADTEAHSKNMKLAAQDGSLPEIVHLDSAEAPEYNEAGYLLDMSDFLKENKDIDDALDGMEDAFNDGKVQYGLPYQSNVQGFFYNKDLFDKAGIAYPTDDTTYDEFLDMIAKLKDSGVTPIAIGSKNSGYSMWEFNEFFSRYGWGDNEKSYTGDKAKYSNDDMNACFEKIKGLADAGAFPENMATIEYFDAKQLFNEGKAAMFGTGQWDCAEFDKNIGEHIGFWWGPKFEDSSYEQNIAMKVPAAPLVVSSAVKDNDKAKEAVYAFLKYYYGEEAAKISYEGSIFPATNYDGIAATDSQYAMNAMITALGNGWKTPKAAPDQTVTPAVQEAMYDAIFGVMQGTYSPKDALKNMDSAAANMASIKDVAQKAGVGVGTVSRVLNNSGYVSDETREKIEEAMKNLQYTPNELARNLYRKKSGIIAVLVPTVEIPFFAELVHNIEAELYNEGFKIMLGNTDKAHNAELEYLDMLNRHIVDGVITGVHSLDVEEYKKIKKPIVAFDRYLGENIPVVAVDHKEGGRLAAEILLKNGCKKIVHFRGSTAVESPYHERHFEFARIMKEQGVECFDYELAWNKFDLEYYKYAVKDLFDRLDEWEFDGIFGTDLVAIECMNEVIRRHKKVPKDVKCVAYDGTYITQIVEPSVTSIVQPIKELAKEAARLICELVNGKTYKNEKVTLGVSVRKGRTTMKMKKEDMSCIDCAVKNCNKMDKTYPDFCLTTHMDEEVLNEAMECYNEDDNRKVTIAAAEVEYENYCKHTRVEEIMDFAKKINAKKIGIATCVGLLKESRILADILRRHGFEVYGVGCKAGTQKKTSVGIPECCEGIGVNMCNPILQAKLLNKAKTDLNVVVGLCVGHDSLFYKYSEALTTTAVTKDRVLGHNPVAALYTADSYYSKLKKSEEEMSRIKIELEKVLKERKISKNQLCYACKLQHTQLNNYCKNKVVRVDLATIAKICDYVGCSIADILVLEKDEEPEQEIAEKMEKRNIRILAILLIIAFFFSFIQTRPYSVRHSTVYTNDNTLEIELYIVTNRFFVIHPDQYCKKIIQKHRRINKLSADTTYQIVLFANSWCFKKGYSCAEYEYRVDNDKIQLQKMTLEEVRAGIDAVDTQMKPLFLKRMECGKHVAEVKAQTGGDVFVLERELEIIEKRATDVDPEIQEEYKTFLRHLMSLCRKYEYELLPEMQEKVMTAALAAAGLTAETEHTQVKIGFTCPKETSDLNLFVNMTKLNGIQIDAVNLMTENGNQKVTMTLDGKITDAGMRCLLCQIGKEAEEFRILELISIMISANEAAFAAVRVMGTCFATGHSAGVAAAVQAEYGEADIRKIRAELDRQGALLMIKAKKAGIQHLTREKGFILKREGSNQVAVLLPSVMPTGLSSQELTKMELDTRRQVLYYVEAFRRYLKGMEQCELTMIGPSIGFRETRRIKGKSMIKAEDVLNRKKCEDGVARGGWKPEIHKDTDKMATYMDVKEGSWFDIPLGAMEELQPVHFPLHPARRILNDTEQLKYSMLKYSSLQTGTLKLGMLWIGGYLNLPQLITDYHDRHPLVTCHLDVEGSKTLFHMLKARDLHAIFIIGSEKQLRNQSVMPLEVTLSRPIYYVTHKDMLNYPTVHSFTDFIKDRFQPDKPIPMIKTLFKHISKYYKDTFVLAIAGVAVGVLVGLVDAAFGLGLNACTAIRTKYFWYLIWFLPLGGVFIWFIYHQFGKSVANGMKMVFHVGLGKNTKLPIRMVPLSVIGTWTTHLFGGSAGREGVAVQIGAAVSNNIGRLVDKTIDIENSRKMFLITGMAAGFSGLFCTPLAAIFFALEVLVAGKLEYHALIPATVASISAAFTSRTLGLRKFHINILETLNYHPSTYNAVLLLKLAAMGLVFGIVGSLFALILRYLRLKFAFRFSSPVKKVLIMGSVVAVLMMIFHQGRYSGTGSNLVALCFDGITDDIYAYDWILKMALTILTLSSGFIGGEVAPLFSIGSCLGYVLGPVFGFDPMFGAALGFASVFCSGSNTLLAAILVGVESFGYNMLPFFSVVCFVSFIFNFNNSIFTAQRVAFTHPVRHQRLKQRIAPKGNMYQEEYKRWLAADLEDADLKPELSKIEGNDDEIKERFAVALKFGTAGLRGVLGAGTNRMNIYVVRQATQGLANWVKTQGGTQTVAISYDSRLKSDVFAKTAAGVLAANGIKVRIYDALMPVPALSFATRYYNCNAGVMVTASHNPAKYNGYKAYGPDGCQMTDDAAAIVYEEIQKTDVLTGAKYMSFAEGVEEGLIRFVGDDCKRALYDAIESRQVRPGLCKTAGLKLVYSPLNGSGLVPVTQVLKDIGITDITIVPEQEYPNGYFTTCSYPNPEIFEALELGLNLAKESDADLMLATDPDADRVGIAMKCPDGSYELVSGNEVGVLLLDYICAGRIEKGTMPEKAVAVKSLVSTPLADAVAAHYGVELRNVLTGFKWIGDQIAQLEAAGEVDRFIFGFEESYGYLAGPYVRDKDAVIASMLICEMAAYYRSIGSSLKQRLEEIYAEYGRYLNKIDSFEFPGLSGMDKMSGIMQNLRENAPAEIAGYKVTEVTDYTKTEETGLPAANVLVYKLENNETVIVRPSGTEPKIKIYYTTLGNDLAEAQAEKDKLAEALKPIMAMKQKKTMLIMVVVLAVLLVLYGGLKAWNSHSDRQKKAKEDKEKVSLVDVKSLKSFAYESGGSKMSFTKENGEWVYDEDDGVRLNQSTIKSTAKEITGLTAVRKLSDPDEKSDYGLDSPDYTVTYTAKDGTKGTIQIGNAAGDNYYAMIEDSDAVYTISGTLVSDLVFDLSSLTENDTLPSISSGNLKKVEVTQNGKTTTYKKKKERAELAGGWGTISLTQCADYNVKDLAKYGLDEANRITVTATYKDSTSGDKKTCTVYVGNVNGDNRYVQLKDSNMVYEVGSSIVENMMSVDKMLEKIKKSFRSASSKNGSYSVGMIALVICMVIVVNLIAGQLPESVKSIDISDNNIYGVSKTSKKVLNKLDKKVTFKIYAEKDSIDTRIKSFIKKYTALSDKISVKWIDPVLHPAALTKAGVDKNTIVISCKDTGKTKSVSFDDILVSDSYSYYTTGSSSASEFDGEGQFTSAINSVTSEQTEKIYYTTGHGEATFSDSVTKLFSKNNLTTDEVNLMMTGKIPDDCDLLFMDAPSKDISDDEKTLLLNYLKKGGKVFIILGDSEDETPNLDEVLKEYGMQEADGYIADMQRSYQGNYYYIFPEITATDDLANNLESEMVLMINAHGLITTDPARDTITTTAFMQTSDNSYAVTEDKQEEGTYTLGAVATEQITSDDSSDSSSSKDSSSDATKTSRLTVISSESMIDSQITDTYTTLENLDLFMNAVTANFDKTKNVAIKAKSLEVSNNTMQHAGIISILTIFGIPLVILIYGFMRWWKRRKAMRAIYKRELRSYFHSMIGYVFIAFLVAYTGIYFLAYNLNYGYPYFSYVLSGILFVYLVAIPILTMRCFAEDKKNKTDQMLLTAPVSLFEIVLGKYLAMVTITAVPCVIYLIFPLIIKAQGTAYIKVDYLAILVFFLLGCVYISIGMFVSSLTESVIIAAIGAFGILLLTYLWSGILNFIPSAAWANALAVAVLLTLVVLAVWNMTKNVVISGVLELIVLAGTLITYFVKKTVFESLLSTVLGKLELTEVFSNIADNHLLDVSGIILYLSLIVLFFFLTMQMIQKRRWSMIEVKNLTKRYGNHLAVDHLNFTVESGKIYGFLGPNGAGKSTTMNIMTGYLGATEGQVLIDGHDILKEPEEAKKNIGYLPEIPPLYMEMTVREYLEFAAELKGIKKDKREPQIEEVIRLAKLRDVENRLIQNLSKGYKQRVGLAQAVLGFPEIIILDEPTVGLDPKQIIEIRELIRKLAKKHTVILSSHILAEVREVCDYIMIISGGKLVASDTTENLENMMSGKGQIEVEAKAPRDEMDHIIRRTGKIKEVKYRTSASSITTAQIIAKGGEDIREELFLAFSHADVPMLTLNQSKTTLEEIFLELTQGSGNRMIKEEKMRTRSIHKAALTDAVTPLEEAGKKLAYEAAVEGIVLLENDGCLPVNPKINHGKLALYGAGAKMTIKGGTGSGEVNERHVVSILEGMEHAGFKITTMDWIDDYDQSFQEGERAYAEEFRKKLSPKNLSDFMNLMSSPYRYPYGRAVLQEDVKKSETDTCIYVISRQAGEGADRKLNENEYGLAEIERVNLTFCAEQYEHMIVVINVGGQFDLNFLHEIPNINAVIFMGQLGTMGGQAVADIVCGKHTPSGKLTDTWAKHYRDYPAADDYSYLNGNLDEEYYREGIYVGYRYFDTFHVAPRYPFGYGLSYTEFEMHLAGMRLEKSTVEISVDVKNKGEAYSGKEVVQIYVSCPDSELKKEAQRLTSFAKTKDLKPGEEERVVLQFDLRNLTSYREKDAATVLEPGEYVVRIGNSSRNTRVCGILKLETEIITEKHSHICKAPIKVTEIERQEEKEVLHATCDCRQNWGRTCDVVIDDVEKIQSFLIEPEIIGKVDHKYGPMEIYSSEETDRIMESLTLRDMAELVVGGGLSGQRFFEAPGAAGVTTGNLTAKGIPNVVMADGPAGLRLHKISSVSITGKVKGVEPNISFMKYLPEPVKKVMLGNPDSKNLLYQFTTAFPVGISLASSWNLELAGEVGNAVGKEMEAYGVTYWLAPGMNIHRNPLCGRNFEYFSEDPLLTGKFAAAITKGVQKNRGCYVTLKHFCCNNQEDNRNKTNANVNERALREIYLKGFEIAVKESHPGAVMSSYNKVNGKYVNNSYRLLTQVLRNEWGFDGLVMTDWFATGRKYGDPAHAIASGNDLIMPGSSGTVDDIVKAVSKGIILEEDVKRSAANVLKGITSSRIYQGFLRKQRENGIMRYEIQGETLPVVICYLDGGEKMITEGGGMSWMSPNMKMETTTNGGIGKAFGRMFSGEHIFQNIYTAEGGNGMIAFASCFPGSIKAFEIGPGQEMVFQKSAFLASEAGVELSVFFNKKFSSGLFGGEGFVMQKVTGRGTVFVEFDGHVAEYELRDDQEIVVDTGHLAAMTASCQMEIKSVPGVKNMLFGGEGIFNTVIHGPGKVWLQTMPISNVAGALRPYMPSSGKMLYENIKKLVEYGIQTGLTPECERIYTTNLLLELFQEDSYEDVEIDSSSIELEAVLEGLLDEAVKRGIIEDSIGFRDLFDTKIMNCLVPRPAQVQKTFAEKYEESPEAATEYFYKLSQDSNYIRRYRVKKDMKWKVDSPYGKIDITINLSKPEKDPKAIAAARNAKNTAYPKCLLCMENEGYAGRLDHPARENHRIIPIEIAGGKWGFQYSPYVYYNEHCIVFNGQHIPMKIDKKAFEKLFDFVKLFPHYFLGSNADLPIVGGSILSHDHFQGGHYTFAMAKAPIEIKITIPGYEDVEAGIVKWPLSVIRIRHKDEKRLIDLADHILRCWRNYTDEDAFIYANTDGEPHNTITPIARMRDGMFELDLTLRNNITTEEHPLGVYHPHAEYHHIKKENIGLIEVMGLAVLPSRLKEELEILADYLVNHEDIRSNEKIAKHADWAEIFSSKYEEITEANVMEILKKEVGEVFVHVLEDAGVYKCTEEGRKAFLKFVETLGVMQKEQLIAKFQELYGEGGEIRTYFAPGRVNLIGEHTDYNGGHVFPCALTMGTWAVVRNREDRKLGFFSLNFEKLGIIETSLDELIPSKNAGWTNYPKGVMWAFEKRGYELTHGMDILIYGNIPNGSGLSSSASLEVLTGLMLKDTFEFEALSMIDLALIGQYSENNFNGCNCGIMDQFASAMGKKDHAIFLDTNTLKYEYAPVVLENAKIVIINSKVKHSLVDSAYNDRRNECETALKELQKVTDIKTLGDLTEDGFEQYKDAIKDPVRQKRAKHAVYENQRTIRAVEALRNNDVKLFGQLMNASHESLRHDYEVSCEEIDILVDLAQAMPGVIGSRITGGGFGGCTVSIVEDATVDRFIEEIGKTYKEKVGHEAEFYVVDIGDGAKIVMKGIQILTEKNKKEVKEHGSYTFPVQVSPEAIQSYEQHSFMWHWHPEIELTWFVSGQMEYVVNDQRYIISEGEGIFCNSNALHAGYMIDDQDCNYISVTFHPKFIYGYENSILQTKYVDFITSNEFWSSLVLKPEIPWQNEIIEYIKEIYTLTCQVQSSSDAFIPGYEGIAEQPELPDYEFRIHLLLCEIWHRLYLHYVQIAQDTPQPQKHLQRLKDILSYIQEHASEELGLEDIASHAGLCKSECCRFFKKYMRMTIFDYLLSTRIQNSIPLLMDGENITTIAGLVGFSSPAYYGQIFKRYMGMSPSQYKKNAAQSPSGDMLATIESINNVVNNFIWGVPAMICIVGVGLLLSIRTGFLQIRKFPYAMKVTIGRMLKKREASDGALTPFQAVCTALAATVGTGNIAGVAGAIAIGGPGAVFWMWISALLGMCTKFSEVTLAVHFREKNAEGDLVGGPMYYIKNGLKKQWHWLAYLFAAFGVLTVFGTGNATQVNTITTAIDSALYNYGVISEQNVSTLNLVIGIILAVLIGLILLGGIKRIGQVAEKLVPFMAVIYIILAIGVVILNYRNIPTVFASIFKGAFSPASVTGGAVGSFFMSMKKGVSRGIFSNEAGLGTGSIAHACADTRKPVKQGFFGIFEVFVDTIVICTLTALVILCSGVPVGYGDAAGAELTILGFTSTYGSWVSIFTAIAMCCFAFSTIIGWGLYGTRCVEFLLGTRANRPFMILYALVAIVGATMELGLMWNIAETFNGLMVIPNLIAVFLLSGVVVRLVKEYFDREGKNVMKKYTIPVVKILEKNIRKERKYVYEISGNLLIKKKKSCTFIMNSNLKKIIMTALFAALACVATMSIRIPTPGTGGYIHPGDAIVILAGIILGPVYGMLAGGIGSALSDLIGGYFVYVPITLVIKGLVALVSGLIYQKICRYGKNRYVAVILGGITDIVFVAGGYFICEFFLYGSGAAASIPANIIQGVGGLIISAVLYPVLIAIPDVRQAAYETKNMKRETFGSRLGFILVSAGCAVGIGNVWKFPYMCGQFGGAAFILIYLVFLLIMGIPVMVCEFGVGRASRHSVAAAYETLEPKGTKWHITKWIGVIGCYFLMMFYTTVGGWMLYYCVRSFRGDFVGADMKTVSAGFSDMLGNMPLMAFWTILISIIGFGVCAFGIQKGIEKVSKFMMTALLLIMIVLAIHSVMMKGAGAGIRFYLIPDFKQMAEIGIGNVIFGAMSQAFFTLSIGIGAMLIFGSYMEKDQRLFGEAVNITVLDTIVALMAGFIIIPACFAYGIEPGAGPSLIFITIPNIFAQVAGGRVWGGLFFLFLSFAAFTTLVAVFENIISFDMDLFGWSRKKSTLVSLILIIILSMPCVMGFNVLAGFTPLGEGSTIMDLEDFIVSNNLLPLGSLGYVLFCTKKNGWGWNHFLEEINQGEGWKFPSGIKGYMSYGLPLLIIIIYLKGYYDKFQPMGTKVLVGWMIVAILFLTFVIGCSCGKSNAEKVDKMSVVIVGGHDRMVHQYKKICKEYKCKAKVFTQMSGNLSEKIGRPDLLILFTNTVSHKMVHCAVTEAEKCNAQIVRCHTSSGNALNEILQNACTAMKINKITNAQEFFKVVDDCKGRVELLTGEWFRFLFITMRSKEAASGRFCRFCSPCVMLTITDLIAVISLCATFYSLGYVRGKHDSKTQKMEMPRKTAASIRSAGVAEDVTDMRMFEEQTKIIQALAKQAPGVFLGRCANFVLGGQPHSYSFFVYADDEYREKEGKEYYKGQTLNELKLRDIQRNEYYQRFTGMKRDDPKHYDMVVNVLKTGVDGAVKMILDYVEQKESGSKMGVSRTEFTFNTGIFFWGFFYALITTAIGYIFYYEGLKHITESSKVPVIASVEVIVASLIGVVWYREHLGFISFLGIVAVLLFIILMNQKANNSLQTENVAAESLMSSLCALSIVTAVLCGIWSYLAGIVGLIGWAGFAGCTTYFACGKHGMSGVKKTVVTNLAGVLCGMTIITLSKFSPVFGNLGIWCGIITFVMCIIAKSEWFDFCPGTFMGCFTTFAADGNWSVLAISLVIGAFLGLACEYGGNWLYQAVTEKKECDTYMGENVLQEKKEIEMHDHVGEGVKVKAAGGISSFDDAEKFMSLGADRLGTSRLVKIMKNTDNGAGYMYKKLEKCLKSIREKTDFKPEKAVILGSGLGDYAEKIKIEKIVKYTEIEGFPVSTVQGHKGQFVFGYVKDVPVVLMQGRVHYYEGYSMQDVVLPTRLMGMMGAKKILLTNAAGGVNPSFRPGDFMLITDHITTAVPSPLIGPNIEELGTRFPDMSEVYSKKLQDIIRKSAKDCGIPLQEGVYVQLTGPNYETPAEIRMVRSWGADAVGMSTACEAMAARHMGMEVCGISCITNMAAGVSDAKLNHAEVQETADRVAKDFEKLVTDVIAAIMTIKELTALPKVELHCHLDGSLSHGFIEKRLGRKVSQSELSVSEDCRSLNEYLEKFDLPGKCIMDETGLKEAGYDVLKSMKQENVCYAEIRFAPLLSETPDMNCNKVIEALLAGLEKGKRDFGVEYGVITCAMRHHSEEENARMLRTAREYLGHGVCAADLAGAESLYPMSEFMELFKKTKALGMPFTLHAGECGNVQNILDSVEAGAGRIGHGIAMRGHADVQKELQKKGIGIEMCPISNLQTKAVGSTKDYPMREFLNARLKVTVNTDNRTVSNTTLTKELEFIQKTYGITDEEIHLMMRNAVDVAFADDAVKERMLKYVMGKTENSKTYHTSQLIETAIEQLKYSYTPYSGFKVGAALLAKNGTVYTGCNIENAAYTPTNCAERTAFFKAVSEGVKEFDAICIVGGKDGVLTEYAPPCGVCRQVMMEFCDPEEFQIILATDVEHYDIYTLKELLPLGFGPGNLKEKMKNYSEDISRQYHIQVAKGEVGRYVIMPGDPGRCEKIAEYLENPVLVASNREFTTYTGMLDGEKVSVTSTGIGGPSAAIAMEELVRCGADTFVRIGTCGGMQPEVKSGDIVIATGSIRMEGTSKEYAPIEYPAVASLEVTNALVQAAKEDGCTWHTGVVQSKDAFYGQHEPEAMPVGYELLNKWEAWKKMGCLASEMESAALFIVAGKLRVRAGACFLVMANQEREKLGLENPVVHDTDMAVRTAVGAVRNLIRQDNEKNKMKQQAFNPYLPGWEYIPDGEPHIFGDRVYIYGSHDSFGAPILFESYFEKVRKMSKIAVVYWSGTGNTEAMANEVAEGAKAAGAEVDVLTASEFGADKMDAYDAVAFGCPAMGAEELEDSEFEPMFSDCEGKLGGKKIALFGSYGWGDGEWMRTWEETCKADGAVLACDSVLANEAPDDDAVVACQALGKALCMMDRYLIEKCLVEHCSATLASMKSANLFNMTFADDTDVEDQIEFWNQCMKEKGIRLYILQRQDKRVLVYVYRKKQLEVSLNRPGVAKFLKKYGYESTEIKYALSRLKSRIGENNEFPHEIGIFLDYPLGDVIGFIVNQGRNFKCAGCWKVYCDECACRKTFAKYKKCRDVYVRLWQQGRSVLQLTVAAMKKQFAVFGLGSFGESIALELQKLGCEVVAVDKDMERVNGIADSVSYAMQADIGDPEFIRSLGTRNLDAVVIAEAESLEASIMAALECKEIGVPNVIAKAKNNRHATVLKKIGVDTIIFPEKEMGVRLAKNLMSASFTDWIALSPAYSIVETPMPAKWSGKTLKELDVRRNYEVNVVGIKSGAHVEVNPDPLEVLRKDMVLILVGSNTALEALMKKTGKQNIRWNTMKILAVGFLSVIFLGAVLLWLPVSNEKSISFLDALFTSTSSVCVTGLVTIVPKYQFTITGKVILLILIQIGGLGVIACITAFFMLLKRKITVKERVVIQEAYNMNSLGGLVGLVRKILIGTVVVEGIGAVFYAIQFIRDYGVAKGIWYGIFHSISAFCNAGIDILGDDSLARYATDPLINIITMLLIILGGIGFTVWYDVIDNGKKIWHREIPGKCWFTRLKLHSKIAIITTGFLLIAGTVLNFALEYHNPATIGHLNTGQKLMVSAFQAVTTRTAGFSTFQQSGMYEETGFLNIILMFIGGSPGGTAGGLKTTTFALLFLAFHTMLRGGHDIECFRRKVDEKNFHVAFVTIMLALAIYITGTTFVAVIEPDTISFQRIMYETASAMATVGLSQDLTTHLRTGSKIVLMIMMYIGRVGPMTIALLFAGKVNLKEKMRTLPTEKIMIGMKFKIKHEIRGRIRIHMEQKRMTHEQADILLFYLQNIDGVFRADVYDRTADATIHYKGNRETIIEGLRRFRYEEVEVPNGLLETSGRAMNAEYQEKLVDKILFHYGRKFLLPYPISAAYTTIMSAKYIWKGIKTLMERRIEVPVLDATAIGVSIFRSDFSTAGSIMFLLGIGELLEEWTHKKSVDDLARTMSLNVGKVWLKTGDQAVLVSSNQIKSGDQVVVHMGNVIPFDGEVVDGEAMINQASLTGESVPVRRTTGNYVYAGTVVEEGEVTVDVKAVGGSSRYEKIAAMIEESEKLKSGLESRAEHLADKLVPYSLGGTALTYLLTRNATKALSILMVDFSCALKLAMPISVLSAIREAGMYKITVKGGKYLEAVAEADTIVFDKTGTLTKAKPTVAEVVSFNGMSEDELLRIAACLEEHFPHSMAKAVVSAAKTKHLDHEEMHSKVEYIVAHGISTQIEGKKAVIGSYHFVFEDEKVVIPEGMEEKFENLPEEYSHLYMAIEGKLAAVICIEDPLREEAVEVIRELRKAGLSKIVMMTGDSERTAKAIAKRVGVDEYYAEVLPEDKAEFCEREKAAGRKVIMIGDGINDSPALSAANVGIAISDGAEIAREIADITVGADNLKELVTLKKISNGLIKRISHNYHSIVGFNAGLIALGVAGIIMPTTSALLHNTSTLIIGLRSMQNLLDEMLNLKDINWKKPGLFAAGVAFGTAGIKILTSDDAKKLYTNCTAAVLRAKSCVMKTATSVQENAGDILAEAKQINEDRAAEAEAEVVDDFCETEETAEDTAEATEEMQLIKFINSLKIFEKDIPWCYNLQKQKRLPDTNEGMSFLLMDKAKEAIVQKLKASGCRITKQRLMLLDIILEENCSCCKEIYYRASRIDPSIGTATVYRMINKLEEIGAINRRNMYKVACDPDCDLQNACTVELDDDTIKHLSAKNWNAVIQAGLKACGYVEDQKVRNITVQSMADIIVVLIVIVLLGFALRGAIRHFKGDSPCCGGGTGIIKTDDKELKNPVIGKKIVHIEGMTCEHCVQSVKKALNEIKGVSARVDLQKKEAVVSYDREIANDVLKKTVEKAGFQVASITEMGNSTGSMFYLFVIVIVLYIVGASIYQAFLWFRKWQEKKRDEKFSMDNEENKEMVAILADIIILALILGYCAYLVYGIVKRFKNGVIQGCGGSCAGCSGCGGGCYSSDPDEVKKMIENMYGKMGIKIALAGNPNCGKTTMFNALTGANQYVGNWPGVTVEKKEGKLKGKRKNDDIIVTDLPGIYSLSPYTLEEVVSRDYILNDNPDVIIDLVDATNIERNLYLTTQLIETGVPVVIALNMTDLLEKRGIKIDTKRLSMLLDCPIVETSALKQTGLDTLIETAIKVANKKEVDLPREIFSKEMEAAVADVKGVLPDTISEDKKRWYAVKFLENDSKVVESMNLSAAAKAAVDKDRKELETKHDDDMESIVTDERYKFIQKIVETTVKKGKDKLTTSDKIDRIVTNRILGIPIFIAVMFVVYYISVTTIGTIVTDWTNDTFVVAVQDLASKGLEAAGVSSVIEGLVVDGIIGGIGAVLGFVPQMAILFLFLSILEDCGYMVRIAFVMDRVFRHFGLSGKSFIPLLISSGCGIPGIMASKTIEQDNDRRLTIMTATFIPCGAKLPVIALMGGVMTSYATGSYTAGGFMAPIMYFVGIVAVLVAAIILKKTKPFSGKPAPFVMELPQYHIPQAKTVLLHVWERLKGFIIKAGTILFLACVVMWFLGGFGFTNGGFGLVDDSADSLLAAIGGFIAPIFAPLGFGEWQPVAASLSGFTAKEAIVSTMGVLANVAESQSEDTVTVAQAIQAWFPSAVAAFSFLLFNLLDSPCLAAIATMAQQMQSRKWFWFAILFQNVFAYLVTLCVYQIGTLVTGGGFGVGTAVAFVVVAVMLFLLFRPDPYKDQKVYSKRSVNAMTLGDAKVGSTVVVTKIEGDSAYKRRIMDMGITKGSELYIRKVAPLGDPVEITVRGYELSVRKDDAQCVQVKMPLTMAGIGETNTISRIGGNEETRRFLANLGFVAGAEVVVLSKIGGNVIVNVKDSRVAVNEDMARHIMVMSNVLNESAENYLETILILSQKLPVVRSVDIANELGFKKSSVSVAMKNLREKEHIKVDEQGFIHLTLSGLEIANMIYERHTLLSSWLIHLGVPADVAAADACKMEHVISKESFEAIKRHVYENKEVMNESIKNMIERRSVRGYKPDMIPKEDLDLILEAGTYAATGMGMQSPVIVAVTDNATRDQLSKMNADVMGTDTDPFYGAPVVLVVLADKNRPTHIYDGSLVMGNLMNAAASLGIGSCWIHRAKEVFASEEGKALLKKWGVEGDYEGIGHCVLGYPAGDVPKAKPRKENYVYHVDMSKYQTPYRYDFVGSFLRPQEVKQAKADYSEGKITKEECDAIVDKAVTEVVAKQKELGFHIITDGEFRRTYWHLDFMWGFEGVGHEQTGAGVQFNAEMAAVEDTYLTGKVKAKAHPFVEGFKFLKQFEDENTVAKYTIPAPAQMFQQMIVPANFENTRKYYATNEELIQDIGKAYQEVIRQFYEAGCSNLQLDDCTWGAIVGDAAKQRYERLGLDLNKVKAQLLEVNNLALEGKPEDMVITSHICRGNYHSTFFTSGPYDSVADYVFAKENVDALFLEYDDARSGGFAPLAKVSEDKKVVLGLITTKSPELEDKETVIKRIYEAAKYIPLERLCLSPQCGFASCEIGNKLTEEEQWAKLKLVKEIAEEVWKDAMMLLQSQLLCWSGVQVEGIAVNKGLVVEEPGRRFEKVYKEHLWESYNKYSHEDTEILIEVQPKYVEVWDTSDDGYAFQLFIDFENKTVEPKNYDKKMKLEGKSLKSDFLRFIIPSIIAQWVFSLYTMVDGIFVARGVSEVALTAVNISMPFTTGLFSISILFAVGNSTIVAILLGQGEKERANEVFTQNVVLLCTLSVLITILVIVFLEPFARFLGATDNILSYAKTYIGTIAPFSMVYILSYSFETLIKTDGYPKLATIYVTSGSVLNCILDYILVMVLHKGVWGAAFATGISQAAVILLYLWHFLGPKGTIRFSKFHLMPSEIWRQIRNGMSSGVTEFSSGIIIFFFNQAILKYIGEYALVSYTIISYVNTIVVMSMAGIAQGSQPLISYYYGKNEPGKYKKLLKYGITAALVGSVGAVVVCYMGAGGIVRLFLKESEASLIKYSVRVFRIFILSFLIAGLNVVLGGYFTSVERAGFATMISLTRSLVALVISLVFLTAVFGGEAIWWAPVIAESCCVVLALGLYRWYRKREKMNILILNGSPHPNGTTAQLRAAFEAGALSLPNSNYIEEAEKSGASLSMKQFYKINEISKLYNIGPDSLRYYEKLGLLAPKRGKNNYRLYTLDDLWRLNIIRDLRRLGFPMEKIREYMDNRSVENTRKLLTEELDAIHQQIQELNRLQKNVEERLQTLSGAEDQTLLKIRLQTFPDRYCHTLNTPYHTDEEMDLLVKQLLNKNTENLYIISNHNIGSFLPLKEINNGQYENYSGVFIIDNYGEYCLSGGTYLTFTYAGDYRQNVTYIPELLTYAARHGLVPDGPLLELIWVDNHQSADISEHITELQLRVYPKDMFKVNQDYLKLPGSYLFSTVARKQREYQAAHPEAEIIKLSIGDVTQPLAPAIVEALHGAVDEMAHAETFHGYAPDLGYEFLRSAMAKNDYQAKGCDINADEIFISDGAKEDCGNIQEIFSKDSKIAVCDPVYPVYVDTNVMAGRTGTYDAATGTWSNVIYMPCTKETNFAPEIPEETPDIIYLCFPNNPTGSTITKELLQKWVDYANEVGAVIIYDAAYEAYISEKEVPHSIYECDGARTCAIEIRSFSKNAGFTGVRLSATVIPKDVKSGDVMLHSLWARRHGTKFNGTSYIIQKAGEAVYSDAGKEQLSAQVAYYMNNAKVIKEGLKDAGYNVSGGVNAPYIWLETPKEMTSWDFFDYLLDKANVVGTPGSGFGPSGEGYFRLTAFGTYENTVAAIERIKKMMKFTKMQGLGNDYVYVNCFEEKIENPPAVARYVSDRHFGIGSDGLIMINPSEVADFEMEMYNADGSRGEMCGNGIRCVAKYVYDYGLTDKTQISVETLGGIKYLDLTVEDGKVVLVKVDMGKPELKSDLIPIISENEKVIDEPIEVDGQVYHMTGVSMGNPHTVIYVDDVKNLDLEKIGPKFENHERFPKRINTEFVHCIDRNTVEMRVWERGSGETLACGTGACAVAVASILNNLTDTRVTVKLLGGDLQIEWDREKNHVFMTGPAKVVFDGVIDITEIKEMTGLIVVFPNKDNATNIRNLLARGGMDVIGVCTTGAQAMHYADTVDDGIVVCGYRMKDMMYTQLREYLPESFEMLLVASQDKWSSGDVEGIVGLSTPIKVYDLLNTVNMMLQSMDRRRKKRRKELKNRDPKQQETIRKAKELLMTRNNMSEEEAHRYLQKSSMDSGTNMVETAEMVLSIMAEMNNYTREDILRMVEEEDVGFIRLQFTDIFGTMKNIAITTSQLEKALDNEIMFDGSSIEGFARVEESDMYLYPNLNTFEIFPWRPQQGKVARLICDVYKPDGTPYESDPRYILKKVMEDAKEMGYEFNVGPELEFFLFHTDDDGLPTTLSHESAGYFDLGPLDLGENARRDMVLTLEDMGFEIESSHHEAAPAQHEIDFRYDEALTTADNIMTFKLVVKTIAKRHGLHATFMPKPKFGINGSGMHLNMSISRDGINVFQDASDEYGLSKEAYCFIGGIMKHMKALTFITNPSVNSYKRLIPGFEAPVYIAWSAKNRTPLIRVPGTRGEYTRVELRNPDPSANPYLALAVCLAAGLDGIKEGTMPPKAVNRNVYEMTDEERKIFGIEKLPGSLIEAAKEFQKDTFIQEILGEDLSRKYIEAKASEYQDYRIQITDWELEKYLHLLMKCTRNVTDHVIWVGANDRRLNLFENLFPIPRGVSYNAYLIKDEKNALMDTVDASASEQFIENVAYALNGGKLDYLVVQHMEPDHCANIQRILELYPETKVVGNVKTMQMISQFFDADLEGRQVVVKEGDTLELGNHTLHFVMAPMVHWPEVMVSYEDSEKILFSADAFGTFGALNGNLFNDEVDFEKDWIDDARRYFTNIVGKYGMQVQALLKKAAGLDIQMICPLHGPVWRNNLNYFIEKHDKWSKYEPEDQAVAIIYGSIYGNTEQAADALAAKLGAKGVKNIAVYDASKTDVSELIAEIFRVSHVVIACPTYNGGIYPPIENLLAHMKALAVQNRTVAVMDNGTWAATAGKQIVKQLEEMKNMTVLDQKLSIKSTLKADQEDNLDAFAQQIIDAMMKKTAKTDNSSDPKTLCYNILSTICILTLATVLAFSFFHITRSDPANIALIYILALIIIARITSGYVFGIISALFCVIFINWCFTYPYFKVNFQISGYPVTFVFLLSISLIISTLTTQLKKQDKMILERERAINEADKERIRANLLRAISHDLRTPLTSIIGSSDSFIENYQNLTDPEKQSLVSSINEDSHWLLNMVENLLSVTRIQDDTGTVKKEDEVVEEVVSEAIIRLKRRLPDIEIHVSAPEDVLIIPMDPLLIEQVLMNLMENAFIHSESDRPIDLRITENPDTVTFHIIDYGKGIDEQTIPLILKGEYTAPRTSDTHRGMGIGLSICNTIVQAHGGKIAAHNHADGAEFLFTLPKGDTMNDSYSILIIEDEKNILDFMSRTLKANGYKTTTVTSGKAGLSIINSQCPDLILLDLGLPDMDGNDIIASVREWTSCPIIVISARTGEHDKVAALDLGADDYITKPFGTSELLARIRTSLRHSNRMASNSPLYIRPYKCQGLILDFEKRMLTLDGEEIHLTPVEYKIVAYLARNSGKVMTYASVMANVWGPFTDNNNRILRVNMANIRRKIERNPSQPQFLFTEVGVGYRMCEDENEVMNAGIFLVATQGNIHALSISPKGLIMGMLLAITTCFYGVLPGPLLKKYPAESVCAWAMLIGGGVLAVFLRPWRIEAHLDMIVIVGFLTIVIVGTILPFCLYLAAVKYAGSVYAGLLSSVEPVAATIVAAIFLGTAFPAIDILGFALVLSTLFILNINSKMNFSEKLQQTLGKAIKDASNEEIYAALLNTVKEAAADKGRNISEKGRKVYYISAEFLIGKLLSNNLINLGVYDEVRELLAANGKDICEIEEVEPEPSLGNGGLGRLAACFLDSIATLGLEGDGIGLNYHLGLFKQVFENHKQKETPNPWIQNTSWLTDTGIGFNVPFKDFSLHSKLYDIDVTGYENGTNKLHLFDIESVNENIVGDGISFDKNDIRENLTLFLYPDDSDKQGELLRIYQQYFMVSNGAQFILKECEEKGYSLEELDKHVVIQINDTHPSMVIPELIRLLTARGISMDKAIEIVTNTCAYTNHTILAEALEKWPIDYLEAVVPHLMPIIRELAARVAAKYDNKDVQIIDEWNRVHMARMDMHYGFSVNGVAALHTEILKNVELKPFYDIYPEKFNNKTNGITFRRWLMHCDKKLVEWMDKYGVSEFRKDASKLEGLLAQIDNEEALNELLDVKQQNKTALKEYLEKESGVVLNDNAIFDIQIKRLHEYKRQQMNVLYIIYKYLDIKAGNKPKRPITMIFGAKAAPAYIIAKDIIHVILCLQELLKNDPEVAPYLQVVMVENYNVTMAEKLIPACEVSEQISLASKEASGTGNMKFMLNGAVTLGTEDGANVEIHQLVGDENIYIFGESSDQVIEHYAKSDYVAADYYINDKDIRKWVDFIISPEMLKIGDVRTLLEIHAELIQKDWFMTLLDVKDYIQTKERVFADYEDRMTWAKKMIVNIAKAGFFSSDRTIAEYNRDIWHVMNTLTYENLHETKKHVSIQFPYNTYLCSIPLDFTQVPLHWHNDVEIIVIKKGCGIISVDTKPRVVKAGDIVLVRPGQLHSISQHGKDCMEYENILFQTSLLYSADSDPRTVGYFQPYFSLEYELPWLFDDTCFFHEELSSCIDAIDDLCSKRPDYYELSVKGHLFHFFYLLFSSQGTPVTFNRDKSLDKVKQIVSYIESHYTEPITVQSTADYLGFSESHFMKFFKQHLHTTFTSYLNGYRLTIAARLLLTEDDSILSISERTGFNNLSYFNRLFKKEYQMSPRAYRNRMEIFSMVLSLLSGVALFLFGMSLMGDGLKQVAGNKLEAFLYKMTNTPLKGVALGTGVTSVIQSSSATTVMVIGFVNSGMMKLKQAIGIIMGANIGTSITGWILCLSYIEGSNGIAKILSSATIAAVVAVIGTIMRMICKRTTHKNIGNIMLGFAILMTGMQTMSGAVTPLRESKVFIDMLTMFSNPIAGILVGVAFTAVLQSASATVGVLQALSVTGILTFSSAFPIILGIGVGASCPVLVSAIGANKNGKRTALVYLLNDTFGMLIWSIGFYTINAFVHFDFLDNIMSPVSIALLNTVFRLVTVCILFPFINKLEKLVCWLVKDSAEELEDEADFDLLEERLLDYPALAIGQCHRAMSGMAKKLRKNVNRAMNLLNEYQQSKFDKVQRKEDLIDKYESRLGDYLIKLTKHEMNTAQTRQVSLYLHTINDFERIGDHASYIAYMSSDMHENKTQFSEDAWDELNVVMEAVREEINLTCKAFLENDKEMAQRVAPLGMVITTLCDELKMRHVERMSSGGCGLEEGTVFTDILNSFNRIAAHCASAMVALMNSDKENMDTHIHDSKVYPSDSSEYKTYLNEYNQKYEIKKDGEHMRSMEPEEVEMRKKEQEHLIQTVYPGSIAEELEIEPGDVLLKINGQKIEDVFDYRYLMKDEYVEVLIRKPSGEEWLLEIDKEYDDELGVEFENGLMSEYRSCSNKCMFCFIDQMPPGMRETLYFKDDDSRLSFLQGNYITMTNMKQADIDRIIHMQLAPINISVQTTNPELRCKMLHNRFAGEKLKFLQDLYEAHIEMNGQIVLCKGVNDKDELKRSIEDLSSYLPFMRSVSVVPAGLTKYREGLYPLELFSKEEAGEVIDMIESYQPKFYEEYGLHFIQASDEWYILAERDFPEEERYDGYIQLENGVGMMRLLKTEFHDALEALKQNDNYETWKNETCRTLTIATGKLAYSTLAGFAEEIMKAFPYIKINVFAIRNDFFGETVTVSGLITGQDLKAQLLEKKASGTDLGDTLLITCNMLRSGEQVFLDDMTVQELEDALDMTLVAVENQGQELIEAMLNHHYTMQRDNDTDSFVYVKGYNSMTSQKQQLNEQKMINHLSTVGILGNVILTAFKLLAGIIGHSGAMISDAVHSLSDVFATFIAFLGVKLSKKSADSEHPYGHDRLECVASMVLAAILLATGIGIGMSGVKTIIAGDYSHLQAPGTIALVAAIVSILTKEGMFWYTRHYAKILDSAAFMADAWHHRSDAFSSVGSLIGIGGAMFGFPVLDPLASVVICIFILKVAFDIFKDALDKMLDTSCSEEYEEKLADYIRKSRGVERLDLLRTRMFGNKVYIDAEIAVDGTLSLKDAHAIAEDVHDNVEKKFPNTKHIMIHVNPAMKGKYLFTSFIMISLIMIVSASCGSSKTDKTSQETPVNYTGENINQLLTYTVPDGYHIDTENCIDKNEASYTIILSSDDLDEEVFTLGIISYKKQGVAITDDCDIDMDYLLNVSKDSVIKKITLNDTFTVDGHTCNEVTVYWPYDPVEEFISPSQNPVSYLLHALGFKKEQKTIAFEQAYIQNGDYIIGVGVRSFNAVQDIENDVLKKDLYKILNSIKFSGNLMSKVYMMVTITNRNKRKDFRTFFKEYGLPVFLETIGRGTAQSEVLDYFGLEESEKLLFLAIVTGETWKKLRRGLITKMLIDVPGTGVSFIVPLSSVGGRKTLQFLVNEQEFEKEEETSMKDTDYELLVAIANQGYIDTVMDAARSAKAGGGTVIHAKGTGMELAKKYLGVSLVEEKEVILIVTKSREKNQIMKAIMEQAGLDSKERTIVFSLPVTSVAGIRMLEEDIQDDLLMNLYRTKLSEKLKESLEAVVPIIAIVLILSFTIAPVPPGILMAFIIGAILLVVGMMFFTLGAEMSMTPMGERIGTRIAQSKRLPVIIGLCFVLGFIITISEPDLQVLAGQVPSVSNMTLILAVAVGVGIFLVAAVLRMLFSKPLSYMLLIFYPVVFILTFFVSKDFLAIAFDSGGVTTGPMTVPFIMALGIGFSAVRSDKYAETDSFGLVSLCSIGPVLAVLLLGIIYHPQGGSYSETVIPDAETSVALWKLFESGIPHYMKEIGGSLLPIILFFTFFQVVSLKLKKKTLIKILVGILYTYIGLVLFLTGVNVGFMPVGNYLGQVIAGLPYRWVIIPIGMLIGYFIVKAEPAVYVLMEQVEELTSGAIPGKAMGYSLSLGVAFSLGLAMIRVLTGISILWFLVPGYALALILTLFVPKIFTAIAFDSGGVASGPMTATFLLPFAQGACEAVGGNVVTDAFGVVAMVAMTPLITIQILGVVYQYQERKKDKEEMLAQPVKVLPLEAYGDADIIELMNKTYYVCKYTPIELLEAFGGECQNLNEMPQGFDHADQIAHPNICGFGKALLEAVMSGKVKELVLVNCCDTIRSVYDILEDSGKLDFLYMIDVLHCDAECSRERTAVQLKGLAKAYGEYKGTTFDEEKFRQAFKKPEHIVKPHISVLGARMGNELFDMVQKSMPYPVENDTCVNNRSVGETEPPKELEFDELMVWYAKELLGQIPCMRMMDHSGRKRLYNDPGLKGIIYHTVKFCDFYSFEYAQIKQNVTVPLLKIESDYTVQSSGQLLTRLEAFAESMNMEELEGKELKMGKGYFAGIDSGSTSTDVVILDKDQNIVTGIILPTGAGAAIGAERALEEALKDAGLQREDIDAMVTTGYGRTAISDGDKSITEITCHARGAHFLNPEVRTVIDIGGQDSKVIRLDENGAVANFVMNDKCAAGTGRFLEMMARTMEMSLDDMGKAGLSYKEDITISNMCTVFAESEVVSLIAQNKATDDIVHGLNKAVASKTAALAKRVGGEERYMMTGGVSKNQGLVKTLEEKLGTTLVISDKAQLCGALGAALFAKDMVTEMKIIETYGNYIEKWSNENPGRARWLLKTGWKAQNLKFRFAPDKRLMPAEQYLARLMMDTMIRPLERPEESAIVSIFTPCEILQEAGLHPYNVEGFSCYLSASKAERAFLQQAENTGISETLCSYHKTFIGAAQKKVLPKPKCIVYTNLTCDANLLTFKKLAKMYDVPIFAIDVPMQQNEDNVQYVADQLRKLKDFIEECTGKKITDETLTERLRRSKRTLEKFAQYEKESADRYIPADLVTPLYAGMTNNLLLGTEEEETYVDRLLNDVKKAPAKKGKKIYWMHTIPFWSDAVKNELCFQEKAQIVGCELSRVCEPDFDPEKPYEAMARRMVYHALNGSAIRRIEAGICHAKETGADGVVWFGHWGCKHTLGAAQLAKRKFEEQGIPLLILDGDGCDRSHGGEGQTSTRLGAFLEMLNTETDENTDRQEESHDEMYCNDTMISICSSRFVENHCCIFAFYKKEEYDVKCFFILEMGKEKKCTLYKKYTSYKKCIPYLILAGFTFFFCWWFVGRHGIFGAKVDWLSQHSVLPDYFRQQFYATGKIFPEFAPNLGGGQNIYHFAYYGLYSPLILPSYLLPFVKMSDYIMVISITGLTVSVLLFYYWLKSRKMDTGVAFIISLMFLLAGPMIGQYSGQIMFVDYMPFLCLALIGVDRYFEKEKSGLFTVSVFLMIMTSFYFSIGGMLVLVLYGLHRYFEQREGCRVTVRGFLVDGLCFVRPMILAVLMSSFFLVPTVLALAGGRSKGQNTSLTTLFVPQITVERFAYSIYGIGLTTLVITVLITGLLYRKVYERVLTYGCVIVLVIPVFAYLLNGGLYIRDKVFIPFLPLLCYLIAIYLEKCRKEKLSLIAGMVPYIITTVFVYIARNQFTSKGIEENVWKALLAESVLFLICYVLYCAVKSHCKETKEILMLALPSVLCLAVTMNTFYQMEPDRYVSHKLYRDVAGEHNEQAVKEALKNDGGYYRTEQMGNDDENAADLNRIWDAGQNITSIYSSAYNSEYQTFRQKTFGLEEPFRNVMMQSVSKNPVFCRMMGVRYIVSDSDVTGYALVKKCEKTGIYQNNDAAPVMYATDRVMTEKEYNKLAFPYNQTAFLEYAVVGEHTESSDQNIMTAYAPVSLKMADNHKAQNGAGNRTTDIGKKNGNERKVGTWIHEKEDGWKIHAKKIKKITFSIRQVQQETTQQEGQRQILFLSFRVDNARPNKDVAVWINGIRNKLSAKDHVYYNENKTFIYAVPLKDGEDTISVTFGKGKYQLSHVQAYLGSLPERSKTLYQSEVQVDKKLTKDNVIQGTIQVKNDGWFITSIPYDTHFKMYIDGKETKIQKVNTAFLGCEIGSGKHEVRIVYHAPGATEGKVFSMIGIVGFVLLLVLMDKISIIIPCFNEEEALPIYYTEMKKVMDTMKKQTDFELIFVDDGSSDRTYKIMKELHRKDGRCQYLSFSRNFGKEAAIYAGLQNAGGNFAAIMDVDLQDPPSLLPEMYRILKEEPYDSVATRRSTRKGEPKIRSFLSKEFYNVINKISKTEIVSGARDYRLMNRKMVDAVLEMSEYNRFSKGIFGWVGFRTKWLEYENIERAAGETKWNVKKLFIYSLEGITGFSVVPLSIASYMGVLFCGLSFLMIVAIVVRTLIWGDPVAGWPSLVCILFGVGGVQLLCTGILGQYLAKTYLEVKNRPVYLLKDSSKEEQRIMMMPLSQNMRRKSYGKGKEVHSVMKQSMRKKIQSSMILVIALTLIIAYAITTLVVYRQTIHIMEGEVRQEADYINVAIDTSGESYLKIMDKVHKDTRITLIDSDGNVKYDSKEDEVTFQNHKNRPEVKEALKTGSGQDIRESNTLNKEMFYYAVKLENGDILRVSKTVDTAFRTAMKVFPVMGLIAVIMLAFASALVKWQVTRLIRPINRLDLENPLENDVYEELTPLLQSIDKQNKEKDAVANMRKEFSANVSHELKTPLTSISGYAEIMKNGLVKPEDMTGFAERIYNEASRLITLVEDIIKLSKLDEGNVELEKEEVDLYKLTREILTRLSPQAAKRKVHVEVTGEPVEYVGIRQILDEMIYNICENAIKYNKEGGKLTVWVGNTLQGKKICVTDTGIGIPENETDRIFERFYRVDKSHSKETGGTGLGLSIVKHGAMLHGAKIHVDSKLGEGTKIELIFMIFCVEDDGNIRELVVYTLESTGFQARGFEDGSSFLEALALETPELVLLDIMLPGEDGMELLRKLKASKKTKDIPVIMVTAKGAEYDKVKGLDAGADDYVTKPFGMMELISRIKAVLRRSAKGSVSSEDTFEIGEIRLDPKKHEVTVHGEVVNLTLKEYELLKRLMKNSNIVLTRDQLLEDIWGYDFDGETRTVDVHVRTLRQKLGDAGEQIETVRGVGYRMSRMRNRFDQQLELLNKQLIYMGELCEEAIGKATTALKEGSMEQAEKVRIADEEIDQAETDIERLCLRLLLQQQPVARDLRQISAALKMITDMERIGDQASDIAEIIITEDKSEAQDIPMIIKMSEAASKMVRDSVNAYVEKDLDLARKVMENDDVVDELFEEVKTTLINFIAENKGLQGVEAIDLIMVAKYLERIADHATNIAEWVEFSITGIHKSSVVMSKISIKNMDLHYGDFHALKNVNLEIEANKITAFIGPSGCGKSTLLKSINRMNDLVEGCRIDGQILLDGQDIFHDIDVNLLRKRVGMVFQKPNPFPMSIYDNVAYGPRTHGIRSKAKLDDLVEKSLRDAAIWNECKDRLKTSALGMSGGQQQRLCIARALAVQPEVLLMDEPTSALDPISTSKIEDLAMELKKDYTIVMVTHNMQQAVRVSDNTAFFLLGEVIEYNETEKLFSIPADKRTEDYITGRFGMSNNEMTLKDKLKAYTRTPGSLIVMLLVMLSAILTFAVLIFLIVYVVVHGVPYLKPSIFSLHYTSENASLMPALINTVIMTFLSLLIAVPFGIFSAIFLVEYAKRGNKFVEVIRLTTETLQGIPSIVYGLFGMLFFVTTCGWGFSILAGAFTLAIMVLPLIMRSTEEALKAVPDSYREGSFGLGAGKLRTVFRIVLPSAVPGILAGVILAIGRIVGETAALIYTAGTVAKVPSNVFGSGRTLAVHMYNLSSEGLYMNQAYATAVVLLVLVVLINTISGMIAKRITKSMKSKAWTEKFMQVIFAVAACASVLAVALICIFLFANGIPAMSKIGFGKFLTGELWRPKNDIYGIFPMIVGSLYVTAGAIIIGVPIGILTAVFMAFYCPKAIYRPLKMATELLAGIPSVVYGFFGLVVLVPWVREIGRSLHRGGNGSSMITASILLGMMILPTIIGLTESALRAVPTQYYEGAVALGGTHERAIFTVVLPAAKSGVVAAIVLGIGRAIGETMAVIMVAGNQPRMPRGIFQGVRTLTANIVIEMGYASGLHREALIATGVVLFVFILLLNFCVALLNRGKNHEMKMKKFIAVLSVATMAAGLAVGCGSSDSGSSDDKSSKGDWDSSNDITIVSREDGSGTRGAFIELFGIEEKKDGEKVDMTTDDAQITNSTSVMLTTVAGDDYAIGYVSLGSLNDTVKALKIDGEEATEQNIKDGKYKICRPFNIATKKGADNELAKDFISYIMSKEGQQVISDNGYIGDDSAEAYAGTKPSGKVVVGGSSSVSPVMEKLIEAYKKVNTGAEIELQTTDSTTGMTSAIDGSYDIGMASRELQDDEKDKLDSQAIATDGIAVIVNKNNTTDELSSDQVKDIYTGNAVAWDEVVKMYVGNVWKCKIEFLNFSCYNSSAGLFLISFFKNYIRYMWIADQWKDYEVIDCSKGEKLERWGQYTLVRPDPQVIWDTPKTERGWKHMNGHYHRSKKGGGEWEFFSLPEQWQIHYKELTFNLKPFSFKHTGLFPEQATNWDWFSEKIRNAGRPIKVLNLFAYTGGATLAAAAAGASVTHVDASKGMVAWAKENAASSGLSDRPIRWLVDDCVKFVEREIRRGNHYDAIIMDPPSYGRGPKGEIWKIEDAIHPLIKLCTQILSDDPLFFLVNSYTTGLAPAVLTYMLGTELKKWNGHVDSQEIGLPVTHSGLVLPCGASGRWEAVMGNEGKNGKVPLISKIAYGFGDVGCNFSWMFVSNFLMIFYTDVFGISMAAVSALMLFSRFWDAINDPIVGGLTDKTKTRWGRYRPWLLVAAPITAVLLMLTFWAHPDWPDTAKVIYMIITYCLLVLGYTCVNIPYGTLCGAMTQDIDERAKINTSRSVAAMIAIGIINIITVPLIGKLGSQSAKNGYLFVAIIYGCIFAACHFFCFAKTKEQVTIPEKEKISIKVQLKAVMQNRPYILALIGQVLFGFTLYGRNADILYYFTYVEGNASYYTTYSMCIIIPSIIGAACFQPVFRKLNNKGRTASIFAFLTGISMLAMYFFNVKDSAVVFYILAGVTQFFFSGFNTAIYAIIPDCVEYGEWKTGLRNDGFQYAFVSLGNKIGMAIGTAMLAALLGKYGYVANQAQNDTVISIMKYAFTTIPGILWIVTAVVLFFYRLNKKRYNEIVEDLKNGKRGMLQQVMTKPGEIIFREVPVPEVKDDQVLVKIMNIGICGSDIHVYHGKHPFTSYPVTQGHEVSGEVVKLGKDVTVFHEGQKVTIEPQVYCGECYPCRHGKYNLCEELKVMGFQTTGTASEYFAVDASKVTPIPEEMSYEEGAMIEPLAVAVHGVKQVGDVKGMNIAVLGAGPIGNLVAQAAKGMGAAKVMITDVSDLRLDKAKECGIDVCVNTKEKDFGEAMLETFGPDKADVIYDCAGNNITMGQAIKYARKGSIIVLVAVFAGMAEIDLAVANDHELDIKSTMMYRHDDYVDGIRLVNEEKVHLRPLISKTFAFQEYLKAYQYIDDNRETTMKVIINVQEMAGRNEKKNITKSKIVNYIINNKITSKAELAQNLSLSMPTVLSNVNELIDRNMVIEIGEYESTGGRKAKRIGINPAYKYAVGVVITANHLGIVLLNMQYEIEKTIRMRLKFSTETSYCLKVAEMVEDFLKDVEDREKILGIGISIPGIIDQANRMVVKSHALQLENFSLSFLEQVFSYPVYFANDANAAMMAEDMHEYQDAVYLSLNNTLGGAFCINGKLVAGQNQKAGEFGHMILVPGGKKCYCGKAGCADAYCAASALTDEEQEMTLEQFMEKVEQKNTKTVEKWNQYLDNLAILISNLRMAYDTDIILGGEVGGYLSEYMIPLGEKVMAYNGFEHDVRYLKNCSYKREASAVGAAKHFLSEYIQHLMDIKAFIFDMDGLLFDSERIVQRSWEIAGDELGIPHMEDVIYHTLGMNRAGRNEYFRKYIREDFPFEEFGKLTRDNFWKIVDKEGLPLKKGAKELLAYGKSQGYKMAVATSSSREYAMGNLIRAGIDSHFDSVVCGDMVKKAKPDPEIYQKACESLGIQPEYCMAFEDAPGGILSAHQAGMQVIMVPDLVQPTQEIRELTYRVCDSLADVIGILNMTENLIKDVKKIQQALINKESIGDEFEEKMEAVHKLEEVADYLKDALGRGIEFMFVWKKYVYEVYKERSFTKAAQNLYISQPSLSARIKKIEEIIGEPLFDRSTTPLQLTEVGKVYIEAAEEITQIEQRVENYINDLAGLKTGNLAVGASTLFAAYVVPSLITQFNQKFPDVHIQLIEGNTAELEEMLGSNALDFVIDNYHYDSILYNKELYCEENILLAVPKHFAVNEELGMYQLSYKNIKNKNYLNQKYPAVPLGRFADLPFIMLTQGNDTRTRGDRLCRNVGFKPNIVLEFNQQSTAYMASSTQLGATFISDILVSQLPTFENLVYYKLDGEEAKRKVFFYYKTHKYKTRVMEEFVRMMHEQIMKPIVRAGRMKPVHSDIRGPLFVEAMKRQKQGIDILKLNTGNPATFGFGLPDSIKNALIEHMQDGVGYCDFKGMPQARQAICDYETSKGIKGITSDDVFIGNGVSEVVSFALTPLLNDGDEVLVPSPSYSLWGNSVYLEDGKPVFYTCDEQANWYPDIQDIRSKITDKTKAIVIINPNNPTGVLYPKELLLEIIQIARESGLLIFADEIYDRLVMDGKQHISLASLTEDVPVITLNGLSKSHCLCGYRCGWMVISGPRELTEDYRQGIIQLTSLRLCANTLAQIVIPAALDDMDTPASMVRPGGRIYEQREATVRELEKIDGLSFVKNDAAFYVFPKLDVKKFNITNDKQFAHDLLDATNILLVPGSGFDWKDPDHFRIVMLPQADILSDAIRRMGTFLDGYKQKMCGNIELRKNEMKITKKEFIMMLGGMFLMSAAVYYEMMPNNLVLGSLSGLVLVLVKIIPLPVSTITFVLNMILLVIGYIFIGREFGVKTVLASLMLPMYLRIFEILTPHVESLSGNIVIDLVCFMIVGGAGQAVLFNMNASSGGIDIVAKLINKYLGFKIGQSITIIGVLISMAAIFVYDRETMVISLVGTLIYGQVLDRFCDGFHVRKKVSILSKEHEKIQNYIVKELRRGATIYPAYGGLDHAEHVEVVTILEKNEYGKLLSFIHETDEHAFVTVSTVNEVVGAWNTVKSRMDTKKKGFPAAFWVCACTEIFERLAYYLGRSLILIFVTASVATGGLGLSDTVAANMQSNLTAFSYLLPLFGAVIVDKYIGARYTTPVGMFIAAAGYFTGGIAKSSAGVYAMIFLVSLGLALFKNGAIIGRVITDKSQMDPAFSMRYTLVNVGAFIGTFLVGILYKDVFAKDGVLGFAPCFKMAALMMVLGGLWYIFVCWRFLGDLGKLPFKKTLTEEEKAAEAKKKEETGTKQPLTMIEKKRIGAIFVASLFSIVFWIFWYLGYMPVYFYWAENMDWVVAGYQVPSTWFDAANSLFCVILGPVTAELWKKLAARPQGDMSLFRKTGLGIAIIGVGYLFYAAIDIMRGGEKASVLWLIVFAFLLTMGEMFFSPLGHSFISKYSPSRYLAVMMSVWGFATFIAAKSYGPVYGLLFGGKIEFKVACIGVAVVSFAAALIMIALDKKLSALVDMQRKNMWKEYTEIQQKELEELSVRYKECLDIGKTERECVKLGKKMADAWGYKNLEDCISEGTTLKAGDKVYADCMGKAFVMFQLGKKPLEEGMNILGAHIDSPRIDVKQNPLYEDSDMAYLDTHYYGGIKKYQWVTIPLAIHGTIAKKDGTVQDIIIGEKEDDPVLVISDLLIHLSQQQIEKKAGVVVEGEGLDILVATKPLTGNDELEKEEKELVKAAVVQFLKENLDMEEEDFLSAELEIVPAGKARDCGLDRSMVIGYGQDDRVCAFTSLFAMLETENPERTSCCILVDKEEIGSVGATGMHSRFFEDYVAELMALTEDGNPLKVRRALRNSYMLSSDVSAAFDPLYADAFEKKNTAYFGRGLVFNKFTGSRGKNNSNDANAEYIAKVRQVLDNNEVGFQTAEMGRVDLGGGGTIAYIMANYGMNVIDSGVAVLSMHAPYEVTSKADIYEAYRGYKAFLKDIKMSLWKYKYFLDVVELKSFTKAGARNYVTQTAVSQQIASLEKMAGGTLLERGNGEICLTELGEIVYEYAREMVQTHERMLHEIERYKESSVVRIGIDSSINKLFWAKMQKMINDKHSEADFHFSKLDSYIGSRMLRENTLDIYIGYGLNELEQLDEIGEKPLISSRIGAYIGLESSINEQPEFKAKDLERYTRYGTKSYLCSMMNGQKNDPQLLTQGIELVDNVDTMKLKVEFNDGYALADSQYFSYSDGDMLLLPGYEGECVIKAFYRKKRNKKKVKEILEEIKNVVNSMLKNIQKYDILHLIIDDCRQKILKLAERPQGDMNMFKKVGLGFLFVGLAFGVMALCEITRGVGADASVKASVLWPREKSRKIYQLKQSSEGSMRNESLEIMMDEKEKCWCNDTGISFFVMCCKEMPVTLFLACAGFEMTDVVHKIQKEIMTELGYKTLRESIVDIIRKRIINRELQPGQKIVEQELAKEFKTSRAPIREALRELENEGLVEYVRNAGCSVKEITFEESFEIYLMRANYEIMAVRLLGGKIPEETLQEMEEILERMKNLDVDEYDQLFSYDNKFHSCLIRMTGMKSLYKAWKSLNYGNIVTGYNLASDKKAVITRQYPIHKELLEACKSRKKEEICRVLSDHYMSTIHRLLKEQGMTEADTKFSLDFLISMETNIISELTTFIEHAPTAFHAVAELKEILKQEGFEELKESEKWKVKPGKRYYVTRNNSSIIAVKAGKELDNYSFHVTASHSDSPAFKLKENAEIEVAKKYTLLNTEGYGGMICQTWFDRPLSLAGRVMVKNGERIETRLVKVDRDLLMIPSLAIHMDRKVNEGRAVNKQIDMLPVLSGSVKEQGEVRSLVAEELGLKDTDIYGMDLFLYNRMGAVRWGSNREFIGCPRLDDLQCAFTSMKGFLAAENEQNINVYACFDNEEVGSGTKQGAASTFLYDVLWRMNKALGKNEEEFYRAVAGSFMLSCDNAHAVHPNYRQKTDATNCVYMNDGIVIKSHAGQKYTSDAVSVAVFRMICEKAGVPLQYFANRSDEAGGSTLGNIAMTQVSMNTVDIGLPQLAMHSAYETAGVKDTEYMVKAVETFYASHIQADSDGNYQINQMKAYERFLKYVSVWTTSDETSETVPSADRELVLAELLVEEMKELGIEDARVDEKGYVYGSVPATRGCENAPALGLIAHMDTAPDAPGDNIHPQIIENYDGKDVVLGTSGKTIKVEEFPYLADLKGRTLITTDGTTLLGADDKAGIAEVLTVVDEILKEGLPHGKICIGFTPDEEIARGAKHFDVEGFGADYGYTLDGSAEGEIQYENFNASTAFITIHGVSVHTGTAKDVLVNSQTIGTEFHQMLPVSERPETTEGYEGFYHLVSFNGNVTETKMKYFIRDFDTDGFHVRAAKMQEIAGSLNEKYGAGTVEIEIVESYYNMREKIEPCMQLIEYAKKAAENADIVPDVAPIRGGTDGARLSFKGLPCPNLGTGGYAFHGVYEHITVEGMDKAVVMVKDIVGMFAKMKLMIASDIHGSAYYCRKMLDAYKREGADRLLLLGDILYHGPRNDLPKDYNPKEVIAMLNPMKQELLCVRGNCDTEVDQMVLEFPILADYCFLEIDGRTIFASHGHHHNPKNPPMLKKGDILLNGHTHIPANEDMGDFIYMNPGSVSIPKEGSAHGYMICESGEFTWKDLEGNVVGIMNWLEISIGIIFLICIITGLIRGAVRIIVSLVATIVTLVIVFFATPYVSQTIEKYTPLDDMIRQKVVSTMADAATSAVSGGDSYSDKGGLTEEAVKKVLKAAGVSEEKLESYGISIADIVSGKVSSDDLAKYGISANVLDGLKNSGNESVENAIENADIPESLQETLIKSADIPAAFKNLLLKNNNKATYQKLGVTTFAQYVGAYIAKQVINIIAFILTFIVVTIILRAVVFALDIVTELPGVGALNHLAGGLFGMGIALVIVWIIFMVITLMYTTDIGKEIYRMVEDNTLLKLIYDGNPIMKLATGVKYMKRRKNSNLHVVREPEDPTDKIIEEIMDELNSEDGVTEKEIQEELARRKRKKQKKIGIVIAVIAIAAILVYLLINLQTYTKVRVSDTYVGEGAADNNYVQFLDGVLKYSKDGISYLNQSGKEKWNQSYQIKNPMIDVSDKSAAVADKEGNDILILQEDGLKGEVHTTMPIEKVSVSEQGIVSAILKNDTSMKVICYDTAGNVLVEHKTSLAGTGYPVDVALSANGEVMQVVYLYTQNGQMVSRLYYYNFGKAGKDEADHKVSGKNYKNTILASGFFMDADTSVAIGDDCMAIYSGKEVPKQSVKIKMDKEIKSVFHNEKYIGMILKNQGKGGYELRLYNKSGKVVLSKEFKGDYSHVKLCGNQVIMYDGKNCSIFMKNGIQKFKGRMDNNILEMFPVGGVNQYIVLSANGMEKVRLVKMERQLPKNVRQIGNVSDNPKIYVEDYVDTYLNQLREKAREQPVGVILTGELLKLEDENAVFVSGAVQMKEVKTNGNDIEITDEIMKEAKEEAARFFPECRIVGWGIIEDGSPMSRNREIKRIQEKEFAEEWNLFLWKNAREQEEVFYAYKFGEIMQMGGHYIYYEKNPEMQNYMINTRRENGVTPSEVVEDRAAKDFRSAVREKMEYKEQHQSSKFAYITSALLVLIVLVIGITTVNNFDKMKSVQTSLENLSKSMENGQTEEDTKTTTAAEAKEGAKEVSGTVKKSEEAKVSKEEESQLTDKDYYVVQKGETLAGISKKLYGDTSHVKAICKMNGLSDGNLIYIGQKLLLPMLTEQRYEQILKLLEKEGSITVTEVKELLNISESTVRRDITALHNAGKLVKVFGGAVASDHVVTPQEPTVAQKITVHVSEKQRIAEYAAGLIGQGEFIYLDAGTTTGYMLEFFCDKDVTVVTNAVAHAQRLAKAGVKVRLVGGELKSSTEAVVGSEAMQTLRKYHFTKGFFGTNGVTKKAGFTTPDANEAMVKKTAIEQCQKKYVLCDHSKFGEVSSVTFLAFTGAVVITDRIAEGYQDCGNIVVIEMKEFKYVITDNEGIHARPAGELVKLAKSFEASVMIEKEGKKADCKKIFGLMGLGAKKGHEVTFTFEGADEEAACEAVSKFMQENLMRITDLLDARSILLDASPKSKSEALDQIVDLMVKSEKINDKEAYRKQVYAREEESTTGIGEGIAIPHGKCDAVTKPGLAAMVVKDGVDFDSLDGEPVTLMFLIAAPNTEDNIHLDVLSKLSVLLMNEEFTESLRNAKTVEEFMNIINDADEKEAGIDERLAGADEESTAEETTGKVKILAVTSCPTGIAHTYMAAEGIEKAAKAKECAVKVETRGSGGAKNVLTAKEIEEADGIIVAADAQVPLDRFDGKKVIICQVSDGISKADELVDRVINGDVPVYHAANGAEVKESNSGKSSGIGHRIYTQLMNGVSHMLPFVVGGGILIALAFLIDGLCVDMNALSAADRGNFGTITPVAAQLKTIGDLAFGLMLPVLAGYIGEAIGDRPALAVGFVGGLMAANGKSGFLGALVAGFVSGYLILLLRKLCDKLPEALEKIAPVLIYPVFGILGIGLLMNFAVEPIMGAINTALNNGLTGMGGSSKIVLGLILGGMMAIDMGGPFNKAAYVFGTAAIAAGNYDIMAAVMIGGMTPPCAIALATLLFKNKFTKSEREAGPTNFVMGLAFITEGAIPYAAADPLHVLPSCIVGSAVAGALSMAFGCTLMAPHGGIFVFPVVGNALMYLVALVVGTVISAVLLGVLKKKVAMIYTVTFNPSLDYIVSVDDFKLGLTNRTSSELMLPGGKGINVSIVLKNLGIESTALGFMAGFTGKEIARRLEEDGVTSDFIQIEEGISRINLKLKSIDGTEINGSGPEIPKDKVEELMDRLNTMKEGGILFLAGSIPASMPDDIYSRIMKELKDKGVMIVVDATRDLLMNVLKYHPFLIKPNNHELGEIFGVTLKTREEVIPYGRKLQEKGARNVLISMAGEGAVLIAENGEVYSSPAPKGTLVNGVGAGDSMVAGFMAGWMEKQDYEHAFHMGVATGSASAFSEYLATRPEVEEVYKQLVMSEVKKIATRESYGNALVELGKEHEDLVVLDADLAEATKTGMFKKVFPERHIDCGIAECNMIGVAAGIAATGKVPFASSFAMFAAGRAFEQVRNSVGYPKLNVKIGATHAGISVGEDGATHQCNEDIALMRTIPGMIVINPSDDVEAKAAVKAAYEHVGPVYLRFGRLAVPVINDNADYKFEIGKAITLREGTDVTIIATGLEVSESLAAAEKLAADGISAEVINMHTIKPLDEAAVVAAAAKTGKIVTVEEHSVIGGLGSAVCDVVAEKAPAKVMKIGVNDTFGESGPAVELIKKYGLDADSIYAKVKEFVKMNKLELMKTANEVRKGIVTAVHSAKSGHPGGSLSAADIYTYLYFEEMNIDPKDPKKADRDRFVLSKGHTAPGYYSTLAHRGFFPVEDLTTLRKVGSYLQGHPDMKHIPGVDMSSGSLGQGISAAVGMAISAKLSNDDYRVYTLLGDGEIQEGQVWEASMLAGHRKLDNLVVIVDNNNLQIDGKITDVNSPYPIDKKFEAFNFHVINIDGNDFDQIEAAFKEARKTKGMPTAIIAKTIKGKGVSFMEDQAGWHGKAPNDEQYAQAMEELEKAGEALCQKMKFFIDTANVEDIKKANDMGVICGVTTNPSLIAKEGKVFEEVIAEIASIVDGPISGEVKATTTDAEGMIAEGREIAKIHPNMVVKIPMTVEGLKAVKVLTAEGIKTNVTLIFNANQALLAARAGATYVSPFLGRLDDISTRGVDLISEIAQIFEVAGIDTEIIAASVRNPIHVTDCALAGADIATVPYKVIEQMTHHPLTDAGIEKFQADYKAVFGEMKKKVTSTDIAHAAGVSQSTVSMILNKKYDVSFAKDTVERVENAAKELGYVPPKRKTRKGTKREKLLVVFCPNLTNPYYVMLLQGIEAHAKEKGFGLFVCNTQRDLRMEERYLKMMWQLRPLGIIYTCNPSHCFMELVGEIAEQIPVAIVNNQNEKMNVDAVELDNSKLGRVMAKHLLELGHRKVAYIAPPLTARQKQRSKRVEGFLKEYEKVGLRDQVIIKAAKEEIDLDVAHIDSEYKIGYELTKELLKETTDVTAIVGLNDMIAFGIMDALHEAKIKVPTDVSVMGCDNTLFARMHNMNLTTIEHFVTFKGRDACDIIMKKIATHHSTNTGAVPISTYHVEYEPQLIVRGTTTYAKNARKKKNMDYYSNQMSKLIEELSCLPGIGAKSAARLAFHLIHMPVDDVKRLASTMVEARENIKYCKECYTLTDQELCPICSNSNRDHQTIMVVENTRDLAAYEKTGKYNGVYHVLHGAISPMLGIGPEDIKLKELIERLQGDVKEVIIATNSSLEGETTAMYISKLIKPTGIKVSRIASGVPVGGDLEYIDEVTLLRALEGRTELMAKRGGFPGGGMPGNMANLMKQAQKMQRQMEEQAKEMETKEFSATAGGGAVEVTVSGSKKILKVKLDEEVVDPDDVEMLEDLLVAAVNEALEKVDAETTSAMSKFTGGMGGGMPGLFMSYTALYRKFRPDEFEDVKGQDAIVRTLKNQINADRIGHAYLFCGTRGTGKTTVAKIFAKAVNCEHPVDGSPCGECAMCKSIAAGTSMNVIEIDAASNNGVDNIREIREEVTYRPTEGKYKVYIIDEVHMLSIGAFNALLKTLEEPPEYVIFILATTEAHKIPITILSRCQRYDFKRISIETIAARLRELIDKEGWDVEDKAVRYIAKMADGSMRDSLSLLDQCAAFYMNETLTYDHVLEVLGAVDTEVFSRLLRQLLAMDVHQVIETVDELVMQGRELSQLAADFTWYLRNLLLVKSSDNMEDVLDVSSENLALLKEEAQMIDSDTLIRYIRIFSDLTNQLKYATQKRVLLEVTLIKLCRPAMDQNKDALLDRIRAIEKQLEEGAWEAPVRERIVYASDAKEAGEPKPKPELPQALNEDVKAVAKDFRMIINEASPMLRTYLKKARLSAGEGNRLLIVLPDELSASAVATPEHKEEIQSLIEQKIGKKVEIDVRQMEAGRRFEDHFVDLENLINMEITVEDEMLRIGMLTSGGDCQALNAAMRGVVKGIFSKRDDVEIYGFQDGYKGLIYSNFKMLTSKDFSGILTLGGTILGTSRQPFKLMRVPDKDGIDKVEAMKHTYHKLNLDCLVILGGNGTHKSANMLREEGLNVVTLPKTIDNDLWGTDMTFGFQSAVDIATDTIDRIHTTATSHSRVFIVEVMGHKVGWVTLHAGIAGGADIILLPEMPYDINSVVEAIEKRGKAGKRFTIIAVAEGAISKEDAALSKKELKEKKAKKKYPSVAYELAEKIQEKTDKEVRITVPGHTQRGGSPCAYDRVLATRLGAEAARAILEGDFGCMVGTKNQEIIRVPLSEVAGKLKYVDPKASIIKEAKTIGISFGDEMDKLDIKLWTLASKGQIVPDRSLLKTPEQIEMIKKSAELNTAVLDHVAAHIHAGMSTAEIDKLVYDFTTEHGGIPAPLNYEGFPKSVCTSINNVICHGIPSENEILIDGDIINVDVSTILNGYFSDASRMFTIGDVSPEAERIVRVTKECVELGLKAAKPWGHLGDIAYAINSHAQENGYSVVEEIGGHGIGLEFHEEPFVSYVTPKGSEMVLVPGMMFTIEPMINQGSPEFYVDEDNGWTVYTDDDGLSAQIEYMVLIKEDGVEVLTKMNKTALFCDGTEGYVYPPEPKESELVTFRFRTAKDDVDRVGLVTSADTYVMEKECTQGEFDYYTFETRLGEEPFRYCFEVQSGTEKYYYGRCGISREILEYYNFVVVPGFSTPDWAKGAVMYQIFTDRFYNGDKSNDVETNEYYYIGDYSQRVTNWDKYPANMGVREFYGGDLQGVMDKLDYLQDLGVEVVYFNPLFVSPSNHKYDIQDYDYIDPHYGKIVDDGGEVLPNGVTDNSQATKYKKRTTGLKNLEASNELFIKLVEELHRRGMKVILDGVFNHCGSFNKWMDRERIYEGEEDYEPGAYVSADSPYRSYFRFFKEGPENWPYNGNYDGWWGHDTLPKLNYEDSVKLENYILYIGRKWVSPPYNVDGWRLDVAADLGRSNEYNHEFWQKFRRAVKDANPNALILAEHYGDPSDWLKGDEWDTVMNYDAFMEPVTWFLTGLEKHSDEAREELLGNIDNFIGSMAHHMSNMLTPSLQVAMNELSNHDHSRFLTRTNHMVGRVEHLGPEAANEYVNKAVMREAVVMQMTWVGAPTVYYGDEAGVCGFTDPDNRRTYPWGHEDQELIAFHKEAIRIHKEHPALKTGSLKILGGEENILSYARFKGHDRIIVVINNRSERAEVKVPVWEAEIPIKCRMKRLLYSYKDGYTTEYEEYLVEDGEVVANMGPHSALVLGMRNEEDHDWLYILMNNKKARGLNGVVFLVFVVFLFAALWFTNQFDQREKEISWKKFQQLVQNDKIESVEVNQNKSVPTGRVEITLKGDDSSDNVRYLYVSDVNEIQDYLKEQNVDYTMPDIPQDSWAATTFLPVILTLVGVFLIFGLMNRQGGGANSKAMNFGKSRAKLSTDRDKKVTFAQVAGLEEEKEELEEIVDFLKSPKKYIQVGARIPKGVLLVGPPGTGKTLLAKAVAGEAGVPFFTISGSDFVEMFVGVGASRVRDLFEEAKKNAPCIIFIDEIDAVARRRGTGMGGGHDEREQTLNQLLVEMDGFGVNEGIIVMAATNRVDILDPAILRPGRFDRKVMVGRPDIKGREEILKVHAKGKPLSEEINLQQIAQTTAGFTGADLENLLNEAAILAAKDNRVFLKQEDIKKAFVKVGIGAEKKSRVISEKEKRITAFHEAGHAILFHVLPDVGPVYSVSIIPTGSAGGYTMPLPEKDEMFNTKGKMLQDITVALGGRVAEEEVFDDITTGASQDIKQATGLAKSMVTKFGMSEAVGLINYDDDNNEVFIGRDLAHTARGYGEGVATVIDQEVKRIIDECYDRARHIIRKYDDVLHACADLLLEKEKISREEFEALFPEDVSEDMAEKVKVLVPEEDVAKRIKELGEQISKDYAGKQVHLICVLKGGVFFMCELAKRITVPVSMDFMSVSSYGDGTKSSGVVKIAKDLDETLEGKNVLIVEDIIDSGRTLYYLMDILSKRNPKSMKLCTLLDKPERRVKDVKVDYVGFNIPDEFVVGYGLDYAQRYRNLPFIGVVEGVEMYERVRAYVKKYHMLQEKDHVIAGVSGGADSVCLLFMLVKLQKEMRFGLTVVHIHHGLRGESADADENYVRALCEKLDVELLAFHEDVGRYAKEQKLTLEEAGRNVRRHIFEEVCHRKNGTRIALAHHQNDNAETLLWNLSRGCGLKGIGGISPVDGKYIRPLLGVRRQEIEEYLKENNIDYCTDETNLEDHYTRNRLRNHVIPYLEREINPRAVSHMADTMEQMRTVWAFMEEEVEKCRKYCVKPKQDKADGVVILEGGFRSVNETVRTFLIHELLCETAGRKKDIEQIHVKLVEELMEHQTGRKIMLPYEMTGERCYEGIWLHKVKDKEKSGENSKPPVQMRILERTPQTSVFPKKTYTKWFDYDIIKSTVKIRHKQPGDYITIDKNGSTQSLKKYFVNVKVPREDREKIWLAADGSHILWIIGYRQNQVYQVTDKTRRILEIEFNGGEEDGRESKSISSMTFYKKLYIFIMISKQIKELYISKKYENKSDKKEDRNVMARIKEQEIFVNPYVVQMDKFAESLQHLSKTFLNMEHYKGTLSKEEIDEMFDKVTGNVCAGCERKEVCLGERREKTYQMMYEIMCAAEEYGAELNMELKKRLKRQCMLAPRFLRESLEVFENAKQILMWNHRMLQTREGYATQLTSFAKMIQYTTRELDAGIFQDEYLEKRIKTALKKENVKMLSIVFYMTQQGKYEVHLTVKAVKGRVILAKDIAFLVGKCIGRTMIPRQGERLVIGGEYGTIACVEGAKFQTLQGIARIGKGLEQISGDTFLMKDLPGGRKGIALSDGMGSGEEAFRDSTMVVEMLEELLEAGFPVETAVQMMNTALVIGREEVKFCTLDVCLFDLYRGSCEFVKAGAAATFIKKKDKVEKIVSTTLPIGVIQNIEIDREVCDLESGDYVVMVTDGVLDALPAKEQEEQMIDIIQNTNIVNPTEFARSILSEVLKYSGEMPLDDMTILVIGLWGVSMKDVKQRNRRRRQCRRSQDHKRSVLAISAVVLLLTVMVSANSMTLKAKNREYQAQETELKEQIQAEKDRSKEIKELDKYVGTDKYVEDVAKEKLGLVHNNEIIFKAKMGITKELFIFLSAILSGAIVRLVYRCISCLRNVIHHTHWIIELEDLAYWVGTAIFLFVQIYYTSSGSVRWYFVLGIGLGASAMSVFLVAVRKWYRKIVCPGSGFLDETLEKGRKKRMETTAVQKSHKLVLNNRKTGLVTGVLDVLSFNLNEILLETEQGMLMVKGTDLHVNRVNLEKGEIDLSGNIESISYSDIQSPGKQAESLFGKLFRMRLDKFLKVSRLIKRRTVANEACDAGRVLVNDKPAKASVKVKPGDIIEIQFGTRTVKVEVLDIKDTTKKEEAGDLFKYLMNKTELIAAIADQAELSKKDSEKALKAFIDVVTEELKKEHKVQVVGFGTFEVSMRAEREGRNPQTGETMKIAACKAPKFKAGKALKDAINEMQEFEQKILEQYDIEVSSTRKVRGAVLCETNKGLFLLKEITTSEKRIPALCELYTRLYEQGYHRIDYVVTNRNGEYISALDNGDRYILKKCFAGRECDIKKTREIFEAAGNLAKLHIIMRYELEHGIPEGTKTDEKYRRHNRELKKVRQFTRKVVPKGEFEFAFLKQFDQMYQWAEAAVEELERSDYEKLYAEEMKKSGMIHGEYNYHNIIMTKEGIATTNFEKFRRDIQVEDLYYFLRKVLEKSGWKIRLGDGMLNAYSAIHPLTEGEMEYLKIRLIYPEKFWKTANSYYCTNKAWISVKNIEKLQTAIRQTEEKKMFLKEVFGFELMNNFNIKLPDDVQFIIHTLQLHGFEAYAVGGCVRDSILGREPGDWDITTSAMPEETKALFDKTFDTGIEHGTITVLLNHEGYEVTTYRIDGKYEDSRHPKEVTFTRNLKEDLLRRDFTINAMAYNDKDGIVDIFGGMQDLEKHMIRCVGNARERFSEDALRILRGVRFAAQLGFEIDEETKEGMKLLAPTLENISAERIQVELVKMLTSDRPELIRTAYELGITKVFLPEFDRMMETKQETLHHMYTVGEHTIHAMMNVRNDKILRLTMLLHDTGKPEYKTMDEDGVAHFKMHALGSERIAKEVLRRLKFDNDTLHKVTRLVLNHDYRMPAVPKNVRRAMNKIGEDIFPYYMEVRRADVLAQSEYQRAEKLKNLDEVEQTYAEIIEKGQCVSLKELAVTGRDLIRAGMKPGKEIGEKLNELLNLVIENPEMNTKEILLKYSFPDKEVMAKEKLVKNITSRDEDFAQWYTDVVREANLCDYSSVKGCMNYLPNGYAIWELIQADLDRRFKETGVENVYLPVLIPESLLEKEADHVEGFAPEVAWVTHGGMERLQERLCVRPTSETLFCDLWAKTVKSYRDLPKVWNQWNSVLRWEKTTRPFLRSREFLWQEGHTLHATYEEAEERTIQMWEVYKDCYKETMAIPFVAGRKAEHEKFAGAEDTYTIEALMHDGKALQSATSHFFGNGFPDAFGIKYVDKNNELHSAYETSWGWSTRSIGALIMVHGDDDGLVLPPHVAPVECRIIPIAQHKEGVLDRSYALLDELKKAGYRVKIDDSDKSTGWKFSEQEILGIPTRIEIGPKDIEKNQVVVVRRDNREKIVVSLDEIAVKLREILEQEQQDMYNRAEEFLNSHIDTATTMDEMVEKFKANRGFVKACWCGDPECEGEVKYQTGGAATRCLIEDEEFISDKCIYCGKPAKHMAYWGKSYMEGKKLQADIGGSRDRDNILTKHISWIKIIDNSKKIFMAMKGISTMATLNILYEDPHILVCVKPHGIATQSKSIRYPDMVSLIKNHLAKASGTSGKSGAPKSIGSRTPGSAEPYLAVIHRLDQPVAGILVFAKTPAAAKDLNKQLQNLGFGKYYRALVTNAPSEEEGTLEDYMVKDARTNTSRICSAKENGAKIARLHYDTVPDHGRLFSTVSGSSSSVDVSLSSQSQECHETELEIHLDTGRHHQIRVQLASIGCPIVGDTKYNPELTGNKGWQTIRLCAYKLDFKHPVTHKAMHFQLEADPAMQITDVRVRKVAKEGKLKAVVSITMDEEFVVHDIKVIEGEKGLFIAMPSKKALDGEYRDIAHPINSGTRERIQNIILEKYEEALTEDVAEAMRAVGIILAGGNSNKMRELTHKRAVAAMPIAGSYRAIDFALSNMSNSHIQKVAVLTQYNARSLNEHLNSSKWWDFGRKQGGLYVFTPTITAENGYWYRGTADAIYQNLDFLKRCHEPYVIITSGDAVYKMDYNKVLEYHIAKKADITVVCKELGPNEDASRFGTIKMNDSMRIEEFEEKPMVAQSQIVSTGIYVIRRRQLIDLIEHCAEDDRHDFVTDILIRYKNLKKIYGYKIKDYWSNISTVDAYYQTNMDFLKPEVREYFFRTQPGIYSKVSDLPPAKYNPGSMVKNSLVASGSIINGTVENSILFKKTFVGNNCVIKNSIILNDVYLGDNAYIENCIVESRDTIRANTRYVGENGVKVVVEKNERYALMRKKEMIAMLLAGGQGSRLGVLTAKVAKPAVAFGGKYRIIDFPLSNCINSGIDTVGVLTQYQPLRLNAHIGIGIPWDLDRNYGGVTVLPPYERSGSSEWYSGTANAIYQNLDYMEQFDPDYVLILSGDHIYKMDYEVMLDYHKANNADVTIAAMPVPMEEASRFGIVIADEDGRIQEFQEKPAEPKSNLASMGIYIFSWKVLKEALETLKDEPGCDFGKHIIPYCHNKGERLFAYEYNGYWKDVGTLGSYWEANMELIDIIPEFNLYEEFWKIYTNSEILPPQYISAQSVIERSIICNGAEVYGEVHNSIIGSGVVIGEGSVIRDSIIMKDTRVGKNCVMDKAIIAENCLVGDNTTFGIGSDIPNKLKPAIYSFGLVAVGEKSVIPDGVQIGKNTAISGVTSKEDYPNGVLESGETLIKAGERAMYKINFEKPVHVHFIGIGGISMSGLAEILLKEGFTISGSDNKESALTDHLEKLGAKVFYGQKASNIISGIDVVVYTAAIHPDNEEFAEAVKQNLPMLTRAELLGQLMTNYDVPIAISGTHGKTTTTSMLSHILLAGEMDPTISVGGILKAIGGNIRVGNSEYFVTEACEYTNSFLHFFPKIGVILNIDEDHLDFFKDLADIRNSFHRFAKLLPKDGTLVINDNIPDLEEITADLDCRVIRYGNDSSLDYSATNVLHDKKGEASFDLVKSGEFIDRISLSVNGDHNVSNALSAIAVADLLGVPFTKIKEGLKSFHGTDRRFEYKGEVNGVTVIDDYAHHPTEINATLTAAKEYPHKEIWCIFQPHTYTRTKALFPEFVDALTHADHVILADIYAARETDTLSMSSEMIAEELKKKGCDAYYFPSFEEIENFCLDKCQKGDVLITMGAGNVVNIGENLLKRMKELKLTKYVQTNATVLDNEFIDQYMVRANGEYVKVYLLLLRHMNQSSGCLSVSELADLLECTEKDVLRALRYWKSEGLLDYLDDTPDDPTPQSTVRSSVPTSELHDVQSGYMTASVPSMTNQMDYPVDSVEAPVSAVPASTTNIQQYRSRKERAEFKELLFVAEQYLGKTLSATDIDQITYFYDTLNMSAELIEYLIEYCVENGHKSMHYINKVALSWHEENITTVNLAKTSSFLYNKNCYCVLNAYGIKGRGPAASEIAYIRKWSEEYGFALEVILEACDRTMNAIHQPSFDYTDSILKRWKDKNVRQLKDIDAVDADYRKEKERAKELAKERKRQQQAQKPAINQNNKFNNFDGRSYDMNDLERRLVQQMALSNSQYDHLMRTYEQKQLDNEFQLRKRYEKAYALIPELEEVDHSISSLSVKKARLLLDGDQTALSSLKSEIKELSARKPALLKAHGLPANYLELHYQCPDCKDTGYIGTHKCHCFKKAIVDYLYTQSNLKDILDKENFSTCSLSYYSRNHIDPLTGRSSLESMETALNVCHNFVDTFSKEFHNILLYGDTGVGKTFLSHCIAKELMDSAYSVIYFTAAGLFDILAENTFGKRQDKDSDVFEHIYDCDLLIIDDLGTELPNSFTVSQLFICLNERILRQKSTIISTNLALEDIKSIYSERTFSRISSNYTILRITGDDIRIQKKLLNLGGTNDVTPMMLRRNDRNLENIPVGALGLIALDGCTEMGAKVNDYLVKWRKEDGHIHKNDVAFIGYEKDTYLIDAKVPRFGSGEAKGIINESVRGKDLYLMVDVCNYNLTYSLTGNINHMSPDDHYQNLKRIIAAVGGKGRRINVIMPFLYESRQHKRSSRESLDCALALQELVRMGVDNIITFDAHDPRVQNAIPLNGFETIRPTYQFVKGLLRTFKDLQIDSDHMMAISPDEGATGRAIYLANVLNLDMGMFYKRRDFSRVVDGRNPIVAHEFLGSSVEGKDVIILDDMISSGDSMLDVARQLKQRKAKRIFCAATFGLFTNGLEKFDQAYEEGILDAVLTTNLIYQTPELLERPYYINCDMSKYIALVIDTLNHDGSISSILNPIERIQNVVNKYKNGEEIMQINELLLKNFGKFHDRQIDLDEGINLIHGENESGKSTIHTFIRGMLFGIERGRGRAAQNDTFSIYEPWGNPNYYSGILKFKSGEKHFRIERNFDKYSKKAELICEEDGEVLSVEDGDLQMLLGEMDAERYDNTVSMSQRNAQMGESIVAELKNYATNYYTSGNGEIDLAGALEQLRGRKKILENEIRMEMAQKQQKREKLEQEVSFVWRDVHHLEEELERVEEELAYRLEKEEEKKKERQREEEHGKGVMDEIRPEKWRIHPMELLVFALVIVIAVILFSKPWNYLIAIVLFLAFGLYIWNRMKVGKKQVKTEPEIILEEITQEEEKVPIEKLRWEKSHITAELKEKKIQYDNLGEQLAELDEVNERSREYEMKRQAVQMAADHLEQLSEEMRGYLKRDLNEKASLFICEITGGKYKKLVTDEKLHVSLMTDEKRVEIEQVSRGTVEQVYLALRMAVGELLCEEEMPVILDDAFAYYDEERMLQTLRWLKEHKKQVIIFTCQTREEQVMKEAGLVYHKIELMLIAGDLFHRQPLLRELKEMNSILEMLEQTEVVMIAGNHDHIRKNSYYRTFTWAPHVHMICSQEMSCVELDRIQTAVYGCSYHSREILEPLYDHAVPEGRQKYEILLAHGGDEKHIPIKSSQIMTLGYDYAAFGHIHKPQMLVENRMAYAGSLEPTDVGDTGAHGYIEGKITGNGCQIRFVPHALREYRHCEVQVDKSVTGHVLRQKIADMIEEQGKQNMYKITLTGYRDPDIWYELDHMDPYGNVVEITDHTKPAYDFEKLKNENKGNILGQYIESLSGYPADSLEYQALCEGVQALMETRRGMKNNYRKLKFSILLQTVLVTALTVLVGGVLLKFVIDGIYNDSFARTFVDVLVFLNINEKTAVHLYWQLIGDNKTFFMIVGYLILFALFFYVALSQMTKYLDQIDHGIENIISESTDPIHLITELKPIEIRLNEIKATLKRQELEASEGEKKKNDLVLFLAHDLKTPLTSIVAYLTMLEDHPDMPEEERKAYTHIALEKSIRLGELINEFFDITRYNLQNIELEPVEIDLTMMLEQLADELYGVLQEKKLTCEVDVEEDLMIYGDPDKLARVFDNILRNAIAYCYADTEIRIEAKMKDGDIEITFTNAGDKIPGDMLQTIFEKFYRVDGSRSTGTGGAGLGLAIAKQIVELHGGRILAKSDDNRTQFVVTLPSKEKTEQKEGSEDEVHTHRRLAFRGKAGRGKRVQSKMNILVVDDEKEIADVVELYLQNDQYKVFKFYNGQDALDCINSTKIDLAILDIMLPDIDGFQILKQIRQKYTFPVIMLTAKTEYMDKITGLTLGADDYIPKPFNPLELVARVKAQLRRCTQYNEGTKEEGDVLDFGGLLLNRTSHECVYNEVPLTLTPIEFDILWLLCENRGKVISSEELFEKVWHEKYYKNSNNTVMVHIRHLREKMSAPTGKSDFIKTVWGVGYKVEEMELTTIRELYKNSDSYMDQKVTIGGWVRSIRGSKAFGFIVVNDGTFFEPLQVVYHDKMDNFAEISKLNVGAAVIVTGTLVATPQAKQPFEIQADTVEVEGASAPDYPLQKKRHSFEYLRTIAHLRPRTNTFQAVFRVRSLTAYAIHKFFQERGFVYVHTPLITGSDCEGAGEMFQVTTMDLNNVPKNEDGSVDYSKDFFGKETSLTVSGQLNGETYAQAFRNIYTFGPTFRAENSNTTRHAAEFWMIEPEMAFADLDDDMFVAEAMLKYVINYVLENAPEEMNFFNSFVDKGLLERLHNVVSSDFARVTYTEAVELLEKHNDKFEYKVTWGTDLQTEHERYLTEEVFKRPVFVTDYPKEIKAFYMKLNDDGKTVAAVDCLVPGIGEIIGGSQREDDYDKLKARMDELGLKEEDYKFYMDLRKYGSTRHAGFGLGFERCVMYLTGMGNIRDVIPFPRTVNNCELMKNLLVAQSGGPTSAINATLAGVIENALSSPSVDKIYGSVNGIQGVLNENLIDLKTKITNVSELDLLCQTPASALGSCRVKLKDPAVCADEYETIISVLRKYSIDCFIYIGGNDSMDTVDKLSKYLNDKGITDITVVGAPKTIDNDLCGTDHCPGFGSAAKYIGTTFAELERDCHVYTTKAVTIVEVMGRDAGWLTAASCLARANGAKGPDFIYLCEVPFSIDTFLKDVKAKLEEQDAVIIAVSEGVKNKDGRYISEEVQSSAVDSFGHSYIAGAAKVLEDAVRNEIGCKVRSIELNLMQRCAAHLASATDIQESRMLGKAACQYALEGAGGMMAAVIRTSDKPYATEFKALPVCDIANAIKSVPADYINNAGNDVTEKMVDYLTPLIQGEMNTVYENGIPKYIYLYMKNKNLSFMTQAAMIAAIYVVLTYIFAPFSFGEVQVRISEALTILPIFTPAAIPGLFAGCLIGNILGGAILPDIVFGSIATLIGAFFTWKLREQKPVVATFPPIISNIIIVPFVLRYGYGVTLPIPFMMLTVGIGEVISCTVLGLIVYGALKKYKSTLFRTAMTLTLKKRLKNAGILTAVFIVAVIIFSYVTNKGNDNMTADMGAATFPQISFSYGEYKINTLTGYAKRMDISSMHNTITPVANQSLDVNVEAYGNKFTGASYKVYTMDGTSQLEHKKIKKVGKGFTLDLSGKKVLDEERILEVRLNRNGADPVYFYTRIVSDEDAHVTECLNYISDYHENALGKVENAGVGAALEPTDDADNTTLQHVTINSNYEQVTWGSLKPQVEQGERWSIKELNSTCMSVQLQYRVSCKGEENEADRYAVKEFFRVRYIADAKKTYLLDYDRTMEQIFDATQKVLNEKGIILGIAPANLSYKVNKDGTIVSFVEANELWNYNKDSDEISLVFGFADAENTDVRNMVSDHKIKLLKVDAKGNTTFLVSGYMDRGEHEGEVGVAVYYYDIEKNSVEEKVFISTNKSYAQAESELGEMSYYDAKTDMLYTMVDGTLYQYSVEDAEKKALVKGLDAQQYVVSEDGSLIAYQANGDLETATKVTILNVETGKKQKVTCGKGECIRPLGFVRSDFVYGVAKTEDIGNTVSGEATVPMYKLEIWNQKGKVIKKYQTDGIYILSASFDEDMITLERASKDGDTYTATAPDYITNNEQKTKSNIALETYATDLKQTQVRLTYNDGVADKEPKVLKPKQILFERPQTITFSDKDAPEKYYVYGHGDIQGVYTKAGDAIKKANDYNGVVVDSSQNYVWERGNRNLQYSITDKDDVLNTIKDRLKNQEKPIDILKDVNNGEAYDLTGCTTEEILYIINQGRPVIAMLDSQNAVILVGYSDTNVVYEDLNDSTRHSVKYEEMDQMTSGSGNTYIGMNELSKLLQENLNIEFISATLSNPKNKDSVQKVKVRPILKKDVLYFQLESFRNNQAFHENVEEKKACEILLKYMENMRQMQMETQRAAYTILVSKKGKVTIKSKMKKGEKKQINMSHDRKKKYVLEEGVPVPFLQDLGVMTQDGKIVHAKFDKFRQINRFLEFIEDILPELDKGRELTILDFGCGKSYLTFAMYYYLHELKEYDIRIIGLDLKKDVIRHCNELSEKYGYEKLRFLEGDIADYTGVNKVDMVVTLHACDTATDYALAKAVGWDAKVILSVPCCQHELNRQIKNEILEPILKYGLLKERMAALITDGLRAQYLEREGYEAQILEFIDMEHTPKNILIRAVKKRHAKEDNNIEASIKRCEAALRVSPTLGRLLDGFAMESANSEKDHPEKEDKEGVMKKWYRMPKAKLFLIVGAHVLAVIGVLCLLWVTRYPILTQELFTVDAAKSYEESNAFADSVTNANYNILDEIRYQTLYDTDGKYDPDKIVDVAKYEDTGEITGKDETGLSFRLGDLYSWGKLISESMTDYDAARSKLDKQDGIIVCKRSDGTYHYFHYKDFKQMIDYGELSFVITGDSSADDILTELKQGEYQESNSGESRFRGLQDIDGKIAYINCWNYDGERVVGDYKTVNGETVLQLVNNSKEWNGKLNEAYRMINNSAETIYSDVDNYAVAQNQYQEGNTNITYLYVNLDNKTVITNKKKYQNFDNYKENLKKMKKSGKYVIVRPKLADYESNIEKAGKGDSMAQKWQETVAGYVDASDYIYASVVDTDYPVKDNFYEQDEIFTRYGAGAKVAGILGMAAVAAYLVILVFLTIGAGKVKEDEEVYLMKFDHIKTELAAASVLLLWAVVALVGVKAGAFTWQNASGETIYMENVESYLPGIVVGSVEALYTCAMFLFGYLSLVRRIKAGTVWKNSVLRWLLIFVKEMFQNIRHLWKSIMGFAIFFMIHWLTYVFGSAGSSIWISNRLWAVILLIIDVAAFIWMVQKAKGTGKIKTGIEKIAGGEVDYQIPVNGLLAEHKEIAEKVNSIGEGLEAALAKSMKSERLKTDLITNVSHDIKTPLTSIINYVELLKQEDLKDPKIQRYIEVLEQKSQRLKTLTEDVVEASKVSSGNITLEFMNLNLVEMIQQTSGEFEEKFKARDLEEVMNLPNEEVVIRADGRRLWRVLSNIYNNAAKYAMQGTRVYADLEKKDGMAYFSLKNVSEQPLNISADELTERFIRGDVSRSTEGSGLGLSIAQSLTEMQGGTFELYLDGDLFKVTIKFPISMYNILVCDDDKEIVEAIEIYLSQEGYKVLKAYDGEEALKLLDKHKVDLLIIDVMMPRLDGIRATLKIREKQNMPIIILSAKSEDADKILGLNVGADDYMTKPFNPLELTARVKSQLRRYTQLGSTVEKENQAVYTVGGLMIDDDQKEITVDGEPVKLTPIEYNILLLLVKNQGKVFSIDQIYESIWNEDAIGVDNTVAVHIRHIREKIEINPKEPRYLKVVWGVGYKIEKLMSMIKNISKAEVLVLKDQVAYQEGQVVSKTLAQNDALSVTLFSFDKGEEISTHESGGDAFVTCLDGVGEITINGEKYELHEGKSIIMPAKHPHAVHGKEQFKMLLVVVFMLGKFDGAESGKCRMYVWLEQSEVIQIKTKKYTVFMNNKDKDQTTAWYEQLKKSGAIKASAEITGKMDRQKMKSEIPIYLQLRNQIVKGIGKGEFEEGELLPTVRQMAAVLRSHPVTPIRRKRGYKIRKIIKKWASEGTFMMKHEFYYTSRDSVTKIHAIEWLPDRDIKGVLQICHGMVEYIDRYDEFAEFMSEHGYYVVGHDHLGHGKSIQTEADLGYFDERKGNQYVIGDIYQLQEMTRKKYPDVPYFMLGHSMGSFLLRQYLTMYAEGLAGVVIMGTGHQGMLTLCAGRMICRIIAAFKGWKYRSTFVDNLSFGGFNKKFEPGETSKEWITSDKKKRDEYVRDPLCSYTFTLGAYYQMFAGMKVLVRKGSMKRIPKTLPVLFTAGSDDPVGAFGKNVIRVYEKYKDAGIKDVSIHLYKGDRHEILNEVDRQNVYQDILAWIEEKNRRMDRKEGQTLFEVTPEISHFAELCEKNNAIDKELYTKYEVKRGLRDLNGKGVLAGLTNISDVCAKKIVNGEEVPCAGNLYYRGYNIKDLVQGFLKDKHYGFEEIAYLLLFGELPDKTQLQTFHETLVERRTLPPTFVRDVIMKAPSRDMMNSLSRSILSLYTYDPHADDTSIPNVLRQCLNLISQFPMLMVYGYHAYNYRMGEDLFIYAPSPELPTAENILMMLRENKKYTKLEAKILDMALVLHMDHGGGNNSTFTTHVVTSSGTDTYSTIVAAMASLKGPKHGGANVKVTQMFDDMMEKVSDWEDDDEVRRYLTDLLDKKAFDRKGLIYGMGHAIYSVSDPRADIFKKFVKQLAREKGCEKEYALYEKVEHMAPEVIAEKRKIYKGVNANVDFYSGLVYSMLDLPPSLYTPIFAAARIVGWSAHRLEELKNVDKIIRPAYKPLAEYKEYVRMDERMKEPTLGNPQNTIEVLQKYNFSFQKKFGQNFLIDTHVLDKIIQSANITKDDMVLEIGPGIGTMTQYLAQAAGKVIAVEIDKNLIPILEDTLSGYDKVRVINEDVLKLDLKKLADEENNGKPVKVVANLPYYITTPIIMGLFENEVPVESITVMVQKEVADRMQTGPGNKDYGALSLAVQYYADPYIVANVPPNCFMPRPKVGSAVIRLTCHQEKPVQVQDEKLMFNIIRASFNQRRKTLANGLKNAATLDFTKEEVEAAIDALGKGASVRGETLTLEEFARLSDLLSPYKKGMIISREKAGFEHDEEAMNAAVREDIMLHAYMLTQSGIPMLYSGDELGQVNDYSYKNDPEKCADSRYIHRGKLPWELAEDKEDVTTVQGNIFQTLDRLEKIRRQEITFDKDADVYTYDVHDDSILCVLREYKGRRFFGIFNFSNQEKTAWMQEKGMYRNLLTGEKTELKDIRLSGYEFLWYGNMTTFYPYQWDLNYRNPRVFNEMIYNFLYLTNQGIDIVRIDAVPYIWKELGTTCRNLKQVYTIVRMMRMIAEIVCPGVLLLGEVVMEPEKVVPYFGTVEKPECHMFYNVTTMATTWNSIATGDIRLLKKQMDIVNQLPKQYVFLNYLRCHDDIGWGLDYETMRPWGIKEIPHKRYLNDYFTGKSRIMGIVYCEADRTFTIQTKNTTYQMQVDRFGFLLHLYYGKKTDGSCMDYLLTYYDRGFSGNPYDAGSDRTYSMDALPQEYPCYGIGDYRSVALIIENADGSTACDLRYRSHQISNGKYKIPGLPAVYAEETESQTLEITMEDVVTGVEVTLLYGVLPDYDVITRSAKIAYHGDGKIFIQKAQSACLDFLYGKYDLLTFYGRHAMERRMQREPVTHGSHVIGSVRGTSSHQYNPMMILADEHTTDSCGNCYAMSFVYSGNFKGEALKDQFGQTRALLGLQDEMFSYPLETGSVFYTPEVLLSFSGSGMNQLSQNLHRCIRQHICRGKYKESIRPILVNSWEAAYFDFDGDTLYELAKEAKNVGIDMLVLDDGWFGKRDDDNSGLGDWFVNEKKLGGTLGSLIQKINDLGVKFGIWIEPEMISEDSDLYREHPDWALTIPGRNPVHARNQLVLDFSRKEVVDHIFDQICKVLDQGNIEYVKWDMNRSLMDVFSRGTKDQGRVMYDYVIGLYDFLERIVTRYPDLLIEGCSGGGGRFDAGMMHYTSQIWCSDNTDALDRLQIQYGTSFGYPISAVGSHVSAVPNHQTGRITSLHTRGVVAMAGTFGYELNLGKLSEEEKEEIRSQVEEYRKFAPLIQTGLYYRLSDPSKEEYAAWAFVSEDQKEVLLNVVMQEIHGNMTVNYVNLQGLKCSAVYRDTETGKTYNGAALMEAGIPMPVEMGEFKAYQMHLVGEEMKKVGKERINWPVTILLIAGLITVIFPLYMTVVIALKKPSEMTNDIAGILSLPKHFSLSNFAEAMKVTDFWNSLGNSLLITIVTVVFAILIHSLLGYAIARNKAHSKFYKFIYFYVVSGMFVPFAILMMPVVKQTAQMGLANRAGVIILYLVFYMPMNVLLYSGYLTNIPMALEEAACVDGASTWTTYWKIIFPIMKPMHATVAVLTALGTWNDVMTPLVIMSGTGKNTLPLAQLNFQTQFGTNYNLAFASYLLALLPILIFYLICQKHILNGVVNGAVKMKKNKLNDRKRTFLLITIPIVALFFCFNTLPLIKGVIYSFTNFKGYGSYDWVGLRNYIDLFTDSRVGGSYIFTFKLAIAATILTNVLSLLMALGLNSKIKFKSGLRGAYFIPNVLGALVVGYIFNYFFTYILPVFGKMIGSKTFSSSMLSNTNLAWIAIVIVCAWQSIAMNTIIYISGLQTVPEDVYEAGAIDGATGWKKFRNLTFPLIIPFFSINMVLSVKNFLMVFDQIMALTKGGPAQSTESISYLIYNNGMSGGQFGFQSANAVIFFIVIVVISVMQLTITGKKEEQLMHRKYRKLVSAGLVLTMAGAMMLQGCGQKKETGKTEIELVQYKPEAVKTFEKIEEEFNRTHDDIHLTIESPNDAMTVLKTRFIREDNPDIIGIGGDVNYSNFIDSDMLMDISDYKGLEDIKEAYKEIDKNLEFVPEKGTYAVPYVANAAGILYNKEMFEEHGWKIPTTWDELMSLCQEIQNAGIQPFYFGFKDTWTCLAPWNAVAVDLAPADVCAQVNRGKTTFSKEYKEVAERMLELLPYGPDDPFAYDYNGACTAFAKGESAMYTIGSYAIPQIQTVNPDMEIDSFVMPASNNKEENTLNSGIDLQFCVMQDCKNKEAAYEVLDFLLEDENVQAYLDAQKAVPCKEGDFELPSTLEGMKEYIKEGKMSDYQDHYYPSEMAVDAQIQTFLMKKDSKAFLKKFDTDWVRYNRDIIRKVEDYEKSHNDMSDILFSVFPNENFVDIGLYQYGWEQCEPSHSFGPAARNHYVFHYVISGTGTLMANDSSGNTIKYQVKSGQGFMLFPNQINTYIADQDLPWEYTWVEFDGLRAKEIVSTAGLSPDHPVYHAGSKDLRNEMMNEMLYIARHPGSSSESPFHMIGHLYLFLDYFMRSAATVRMNQSGKIRDFYIKEALSYIEQNFQNNITIEDIAAFCGLNRSYFGKIFHDTIGKSPQEFLISYRMTKAAELLKLTSLSVADIGNAVGYPNQLHFSRAFKNVYGTSPRSWRNTNKLEPDMFNNYEIVEYIHSLPLQIQSFTGRTTQDDRGDIKDVLEHWHQEIEMPHAGDYDLEELFAWIDKICGMETDNFWEIKKKLTFTEICVEVRRLGDDYHILVSGGECPHIGCTVLAIPRPSLDGSGKMSSTASVLNVTGHKDEEVCRYLAEKVSAGKKTTVVCTGGIHMDGITKEQIAEIVEAMRIIAGEIVDKMCRESREDKECLLTKSRKDKKDRKRIVVAATGASGLPILKMCLQIIRGDSDYESILILSDSAKITLQQETKDTVEEIEALADQVCDTKDIGAGPASGSFRTEGMLIVPCSMKTVAGIHSGYADNLILRAADVTIKEQRTLVLAARETPLSAIHLRNLSELATIPGVRIIPPMMTFYHQPENIEEMTYHIAAKLVEPFGIEAREYRRWTGLVMAAKVTDLRSALKMLEDMPGQLIETDVEVEPMAELSGVYRHVGAGGTVMRPTKEGPAMIFNNVKGHPGARVAIGVLASRTRVGALLECDPKDLGKKLYHSVDNPIPPVLTEEAAPCQEVVHKATDPDFDLYKLVPAPTNTPVDAGPYITLGMCYASHPDTGVSDVTIHRLCIQGKDELSIFFTPGARHIGAMAERAEELGQRLSISISIGVDPAIEIGSCFEPPTTPMGYDELAVAGAIRGEPVRLCKCLTVNERAIANAEYVIEGEVVPNVRVQEDQNSHTGYAMPEFPGYTGPASDQCWMIKVTAVTHRKNPIMQTCIGPSEEHVSMAGIPTEASIYGMVEKAMPGRLQNVYCASPGGGKYMAVLQFKKLTASDEGRQRQAALLAFSAFSELKHVFLVDEDVDCFDMNDVLWAMNTRFQGDADIITIPGVRCHPLDPSNDPSCSGSIRDHGIACKTIFDCTVPYDQKDRFKRAQFMDVDPEHWVKMTFDQIQYFIAIAECNTYFDAAEELNISQSALSKQIIKLEKELGVALLDRSRRKASLTPAGETFYQDALALRRQYEIMNRHMKKYQIFTGNKNELRVGTLPILTQYGLTAHFRQFTESHPDIHLILDEVEENDLKKGLLSSQYDLIICREQMIADQSDISSVYLADDELVTVLPVGHPLDGPVSLSALADESFILMNRYTSVYQICQALFANVPVHPQILRTGRVESIISAVAIGEGVSLLPYSNFKLFHHEHVKTLPLTPPVKLPVVIAGTKKRINSSICQEFIRCMTEHMIFDTHAHYDDEQFNEDRVELLNSMEEQGVGTIINVSATYNSCRKVIALAKEYPFVYAAVGIHPDEVGSLNEETFAQMKELFKEEKVVAVGEIGLDYYWDNEPREVQKKWFIRQLELARELDLPVLIHSREAAADTMEIMKEHAKGLSGVIHCYSYSKEMAQEYIKMGFYIGVGGVVTFKNAKKLKEVVENIPLTSIVLETDCPYMAPEPNRGKRNNSAYIRYVAEKIAELKGITYEEVVEQTEKNARDMYRLMCEKCNKGKYYITTAIAYASGKPHIGNTYEIVLADAIARYKRSQGYDVFFQTGTDEHGQKIELKADEAGVTPKEFVDNASCEIKKIWDLMNTSYDKFIRTTDEDHEAQVKKIFKKLYDQGDIYKGAYEGMYCTPCESFWTESQLVGGKCPDCGRECKPAKEEAYFFKMSKYADRLINYINEHPEFIQPVSRKNEMMNNFLLPGLQDLCVSRTSFKWGIPVDFDPKHIVYVWLDALTNYITGIGYDCDGNSTELFNKNWPADLHLIGKDIIRFHTIYWPIFLMALDLPLPKQVFGHPWLLQGDGKMSKSKGNVLYADELVDFFGVDAVRYFVLHEMPFENDGVISWELMVERMNSDLANTLGNLVNRTISMTNKYFGGVVTDKGVAETEEEKAVDADLKAVTEDTPKRVDAKMDELRVADAITEIFVLFKRCNKYIDETMPWALAKDEAKKDRLETVLYNLIESIKAGAKLLESFMPETSEKILAQLGDGKVTEKPEILFARLDVNEVMKKVEELHPHVEEKEEAKEEADEEVIDIEAKPEITFDDFGKMQFQVGEIIACEEVKKSKKLLCSQVKIGSEVKQIVSGIKKHYSAEEMVGKKVMVLVNLKPAKLAGVLSEGMLLCAEDAEGNLALMTPEKNMPAGAEICMYTPAKERYNIMEYNRCGRSGLLLPKISLGLWHNFGDASDYENMRQLCFTAFDNGITQFDLANNYGPAYGSAEKNFGRILKEDLMPYRDELIITTKAGFDMWEGPYGNWGSRKYLLASLDQSLKRMGLDYVDIFYHHRMDPETPLEETMGALATAVCQGKALYVGLSNYDGETLEQAAAILKDLKCPFVINQNCYSIFDRTVEKNGLKDMTGNLKKGLITFSPLAQGQLTDRYLNGIPEDSRIRKDGRFLKESILTAERMEQIRKLNELAAQRGEKLADMALAWLLQKKEVTSVLIGASKTQQILDNIKAIHSAPFTEEELQKIDEYSLMTRRQYFTAGFKDGIPICLGYIAVSFTFGIMAKKVGISIFDAVLISLTNVTSAGQFAGLSLIASTASYIEMAITQLIINLRYCLMSCALSQKIDPEAPLFHRFLIAYGVTDEIFGVTVCKGGKLSPFYSYGVIFISVFGWVFGTFLGILSGNILPARVVSALSVALYGMFLAIIIPPARNNRVLAGVVVISMAASFLFDKTPGLRNISSGFRIIIITLIIAGIAAYFFPVKEDEYDELEEAGELSDSTKEAHHESMNHNIYIYIFVMAAVTYLIRMLPLTLIRKEIKSTYIKSFLYYVPYVTLAAMTFPAILSATANIWSALAGFIIAVFLAYRGKSLLKVSLFACLGVFIVELITGLMQKFLEKFKRKPLLFLLPSASVLLLLFLLFFHSQQDADQAFSKYTSELFRQEISGNTITLHYTLKNPEKYGIENAPISYGQCTTDPELVRSSVDAERTRLRSYNRTSLSKDNRLTYDVLNDYLNSAYDLSPYTLYDEPLAPLTGTQSQLPVILSEYRFYEISDIENYLQLLTKTPEYFRSILNFEHTKSESGLFMASYTADSIIKECRDFVHLKESNYLYSSFVERLDELASTKNSGLTEKQRKAYTRQNSAYIKKYIFPSYEQLISGLSELRNSGKNNNGLCYLPNGRTYYEYLVRSETGSSRSIAELQNLTNAQILSDLTVMQRVLTEDSSSGSSSVTSDIFSSQGTLLSESDPEKILSTLSNKITKDFPPYPQIHTQIKYVQKSMEDYLSPAFYMIPAIDNTSENVIYINNGHLTDNLSLFTTLAHEGYPGHLYQNVYYASLHPNPIRCVLNYGGYTEGWATYSEMMSYYFSTLTKEQATLFQRNSSVILGLYALADMGIHYDGWKLADAAAFFHTYGITDDATIEDIYDLIIADPANYLKYYIGYLEFLELKKDAVDKWEDNFTQMQFHKAVLDVGPASFDVIRAYLFMNKGKRPIGKILMILSVVFFYLPILYMIIFSFNDGKSLTSFTGFSLRWYKHMLESADMMDALSTTFSIALLATFISTVAGTIAAIGVSKSKKLIRDLMEQANNLPIMNPEIVTAIGFMLLFITFHVEKGYVTMLLAHIAFCIPYVMLSVMPKIKSLDPNLADAAMDLGATPWQALTKVVVPQITPGIVAGALIAFTMSVDDFIISYFVTGRGVKNLSIMVYTMSKRVNPSINAISTLVVVIITIVLVIINAAPALFAKRAKRNSIGRRNVLLPAVAVACVLAIVAGVVTYNNKKEPLPFEGQTLRIYNWGEYVGEHIIQDFQKETGATVLLENFDSNEQMYIKVANGEAYDILVPSDYMIQRLISEGYLQKLDKSKLNCMDKLYDAVKGLPYDPENEYSVPYFWGTVGIVYDKTKVDIKDLEKEGYNIFLDQKYKGDIYLYDSERDSFMMALKALGYSMNTSDESQIQEAYNWLVQCVQTMKPEIVTDEIIDNMAQGRKALGLIYSGDATYVINENENMGYYLPEGGTNQWSDAMVIPKNAKNPELAHAFINYASDYDGAYDNSSYVGYTSANKKVMKDLYGKGGEFEGIDAYIPRTDNKNDEVFEYNEETKKEISNLWSKVKIAASNTNMKKFSQLAFPYIVWAILMLVFPMVLIALYSVTDQGNSILSFTFTLEHYAKFFTDPDFLLILWRSIVIAVKTTVICLLLGYPIAYYIARSEQKKQNALILVITIPMWINMLVRTYAWIGLLSDGGLIQRILHMVGLGKGSLLYTEGAVLLGMVYNFLPFMILQIQTSLSKMDNSLLEASADLGASPAQTFKRVTLPLSVPGIINGITLVFLPAVSSFFIPKLLGGGQYFLIGNMIENQFITVGEWNFGSAISMIMAVIMMALMMVVRKIEIRNQGGKGVMEEKKLIEFRNIVKSFDTQVVLKGINLDIYENEFVTLLGPSGCGKTTLLRILGGFLDADEGKVIFDNEDITDKPPYERELNTVFQKYALFPHLSVYENIAFGLKLKKMSKDIIDQKVMKMLKLIGLEGYEDKNTTLLSGGQQQRVAIARALVNEPKVLLLDEPLAALDLKLRKEMQYELKRIQQEVGITFIFVTHDQEEALTMSDKIVVMQKGEILQIGTPQEIYNEPTNRFVANFIGESNIISGRMIEDYKVRFDDITFDCVDHGFKENEPVDVVIRPEDIDIVDVKDGKMTGEVLSVLFKGVHYEIMVETVPGTSVTVNMRVIRNHDVTSEDGSEKISANNFYVDVEDVENLDDKEIVALSNAQAWETETDEYISIANIEYELEAKEGQYPVTFSTSNGTSIERTIFVVNQPFVKNEKANEGVMAFNFFKTVDEITESQALDTDLKTWANAQGWKLTDEDQSVDISVDYDFDPEEVTEGVYEITFSTTGREFKIHTTDYSEEGQEVGLTFFPEDIHVMPKVVFMDIGKKLRELRKQNDLTLEDLASRSELTKGFLSQVERNLTAPSIATLEDILEALGSNLSEFFHEEEEKQIVFGVDDFFVDEKEDYQVEWIIPNAQKNQMEPILMTLYPHKKSHVQTSYTGEEFGYVLKGNITIVRGGKKYKVKAHETFYMDGAKSHYLYNHGNSPAKILWITTPPIFMNTATTANIQNNNPTAFYHLPGLFEFYELYRIFLPLFRKHREYFYDWCEIGSIYGAPSDCIWGGGRTSFGYSDPEDVLDLVREYGISARLTFSNSLLREEHLTDKKCNELCKMFEHASDADNSPHTHQLQNGVIVHSELLLNYLQKNYPDLYLISSTTKVLTDFQDFLTEINREDFRYIVPDFRLNKVFDKLDLMSQHQKDKVEFLCNECCWFGCKDRKTCYESVSRKNLGNPAPEFHCASPDGGNGYRFSKAMENPGFISVDDIQDVYMPMGFSNFKIEGRGLGSALILEFLLYYMTKPEYQLHVREEIYLDNMLDLFMKLTILGTGNATVSECYNTCYAISDEEKHFLVDAGGGNRILKVLKDTGIDMNDIHDIFVTHEHVDHVLGIIWLVRMIGQRMNQGKYEGDLRIYCHEELAEKIQAIANMTIQQKVCKHMGERIQFDVVKDGDSRTILGCPVTFFDIGSTKAKQFGFTMQLKSGKKFTCVGDEPYNEVDYKYVKDSDWLLHEAFCLFGEADKFKPYEKHHSTVKEACQLAEELGVPNLLLYHTEETHLAERKKLYTEEGQQYYHGNLYVPDDLETFEIMKNQKVIVYDLGDDFGENMDLMIYGMDGEVPVGIYDGECKIDFEEIVNSVVNIMTYSEIRELEKVFVKADKNKAAEALGAYQVKKQGEYTLEDYYALPDDQRYELIDGVLYDMAAPAVTHQEIVFEIAVALRNTGLRMMSKEQSYQNAASELLRLVGGKENVISAAHCATRLRLVLKDESKANVDGILKTELVKGQFSTGGQFQIIIGSGTVDEVYKYFIQYADIKESTKNEVKKAADQKMNPLQKLVKMLADVFVPIIPALVASGLLMGLNNVLTAEGLFVSGKSLVEVYPNIADLASMINTFASAAYAFLPILVGFSATKMFGGNPYLGAVMGMIMVSGDLLNAYSYGTAITEGTVPVWHIGALTIEKVGYQGTVLPVLAAAAILAFIEKKLHKVVPEYLDNLLTPALSVLVTAFLTFTVVGGVMRTAGDWITNGVLWLHDTLGVVGGFIFGFIYAPLTMTGMHHSLLPVDIQLIAAGGSFLFAIAACNNVAQGGATLAAMFCAKDKKMKSIAVSSGISALLGITEPAMFGVNLKMKYPFYAAMFGSAVGCAYVTLTNVQNISPGAAGIIGFVCIKSGGMLNYMIGILISLVVGFAVTIALSKHPKFKEVMQISFEEEQQVFHLYNDKISYVIQVEKQRYLKHCYYGKRIKRWHSGIKDYYYDRGFCANPIEEDRTFSLDTQLREFPESGQGDFRSPAYELEDRNGDKNARFFYNGYRILSGKIAPDGLPHVYTDADTEAMTLEITLQDKVRNQRILLYYTIYEDAVVTRFAKWINDGTEPIEICRFLSMNMDLPIQEYDVLTLSGAHTEEKNVYRRPLCADSVTIESSRGTSSPQATPFIGLLSPGTTEEQGEVLGVNLIYSGNFYGCVQCGQYGTIRVQLGINPYQFGWQLAPGTSFCTPEAVLVYSVNGLAGMSNIFHRLYRTRVCRGWYRDRERPVLLNSWEGMYFEINEEKMLTLAEEAAELGIELLVMDDGWFKGRNTDTTSLGDWTEDKKKFPDGLQSLAEKVKQKGIDFGIWFEPEMISRESDLYREHPDWVIRSPLYEPILSRHQLVLDLSNPAVCEYLIEAVSKVLVPGNISYVKWDMNRHLTDLGSAYLDRKNQNELSHRYVLGLYQVMETLTERFPQVLFESCSSGGGRFDAGMLYYMPQTWTSDNTDAVCRLKIQHGTSFLFPTVTMGAHVSACPNHQVGRTTPLATRFAVAAAGNLGYELDLKKLLKEEKKEVREQIAEYKRRRRTVQFGTYYRLADSFQENQSAWNIVSEDGMEVIFTHVQILARSAYRVPVIRLKGLDPDAVYTDCETGQEYGGDELMYAGIRIPRIRQDFSSTTMVLRKSMEKKWWQSSVVYQIYPRSFADSNGDGMGDIPGITGKIEYLKKLGVNVLWICPIYQSPQDDNGYDISDYRTVYPEFGTMEDMKILIQKCQDNDIKIIMDLVVNHTSDEHPWFIEAKKSLDNPYRDYYIWRKGEDGQPPNDLMSNFGGSAWEYSPETDEYYLHFYSKKQPDLNWENPKLRQEIYDMMNWWLDQGIAGFRMDVIDLIGKIPDQKIKENGPMLHKYLQEMNEATFGHRDSMTVGECWGATPEVGRLYTDPARKELSMIFQFEQIQLDKKPGGQRWDLKPLYLPDLKCVFSKWQTELEGHGWNSLFWNNHDLPRIVSRWGNDGDYRVLSAKMLATLLHGMKGTPYIYQGEEIGMTNVPFQTIDEFPDIETQNIYQERLKAGFTEEETMYAIRAKARDNARTPMQWNAEKNAGFTEGTPWYRVNPNYKEINVEQALADPESVFYHYQKLIQLRKEHEVMVYGTYQLLFPEDEDLYIYTRTLEEEKWLIVCNFHEKTRKLQCKRAGQVMLSNYADTPAAEKITELRPYEAVIYQMKSWDANHGERGQDHSSDFEADIELVMSRSLKETNFHGTPMFPLQIYSHKDKNGFYSVTAHWHEELEFLYIEEGTMRGIISGTPYEMKAGEFYFINSGELHELSAHNHSLHHAIVFDPKLLNFDLYDACQHNFIQPITQKKLLFPNNISNALSQKERENLRQLFLAMIYNYHHPERCALLKIKICLLQILELCFRTEILIQNQTTGKQLSSINQLKEVLDFIRSHYAEEITLKELADIACMSPTYFCRYFHQEMGKTPFAFLNEYRIKKAAILLDDSSLSVSDIAINCGFDNISYFIRKFKEYQGITPKKYRSRKMPEMDTGLLGLMLLDCKSAQLENLVAIELIRRYGVENVYFFENNVEIDFYVPSENLAIQVSMQVLDNIDTRERETRAFVKLNNFIPDSKCILITNSEEAVLDCEGIRVEVIPIWKWLLMNDLMETKQPFKALSKICLNNWHYIDKKILTLNEGINFFTGHSGSGKSTVLDAIQIVLYANTDGRGFFNKAAADDSDRTLIEYLRGMVNISENNESQYLRNRNFSSTIVLELTQTNTRDKQCVGVVFDVDTSNNDVSRLFFWHTGELLPNHYRSEGRCLTTAEMREYLQRSFTPEQFYCGPSNERFRRQLYDIYLGGLDMEKFPKLFKRAISFRMNIKLEDFVKEYICMEQDIHIEDLQESVMQYGRMRSKIEETMEEIRRLKLICEKYEQYAEKSDEEKVCSYQIDRLEIMNHEVKSQEARDRIKVRQEAIEDLKKQQQVLEQEEKDLQKEYEEIILRIADSGYARLESDLDTLNETLERLNNGKVRWEQTAEHLKVWTEKDITPNQVIWDIEKFADGSISEEELVRLQEGLKDLQEELEDQRQEADADLRRIKKEEKEARAELKELKQGKKAYPRELEEARFELRNRLHERCGKFVNVHILADLLDVKDERWHNAAEGYLGNNKLQLIVEPKYARAAMDIYQEMDTKRFFRAAVLDTEKLTKDKHQVQPGALAEVVKAKEAYVQEYINFFLGNVKKCESLDELRECRIGVTPDCMLYQSYKLQHMNPENYTRRAYIGETSMRQRIRKLEEKCEKLNGERMPVQELLEEIRQAMQMEMLKQPAEDYLGWLADSKAIISKEKKKAQLLEQMQKLKDESVAAWEGKKKEVQAAQDVKKESVSKVQEAIWENKKEIERLNAEVLESEEQIKDVKRKVADKRYEKEFQEYLASRKSENYEYLRRQMVSRVYTLREEEEDAYRKLVEERSGYIREYPNRTFSTSIRDNAPYEKLLNSLSCDHLETYRESAKTQAKAAVEHFKDDFIFKIRSAILEAYQRRDELNRIISKLDFGKDKYQFVITKNKGADGKYYKMFMDDSLQIRPSDLDDTMDNQLDMFTMEHENQYGEMMNELINIFIPPENATKDEMDEAKRNMDKYADYRTYLSFDMQQIVHGDKEMTIGLSKMIKKNSGGEGQNPLYVALLASFAQLYKINLSPKMHRSPTLRLVVLDEAFSKMDAEKVASCISLIRGLGFQAIISATNDKIQNYLENVDKTFVYANPNKRHISIQEFEKTEFGELAEEMIDYYEQLTQEEKEEVTEVIQTLYRQTFLLERKFDKRAGRMQYTKEYRTCTKHLEFFKAYFEVAGIILRENVHMGVIYIQGEQLWGEKLPRLATIYLLVLKLIYDEQMQTASSSSHVVTTLGAVNGKAGEFHVLKSLPSITEMRRTIALLKKYQIIEPLDVLEELNESTRLVIYPCIHTVLLGDDIRELLATFSEEDQIGDEAAIQSTLEDMPEMQLMNEIPDTFWSLFRSVNRDIYIEALLCINEEYEYNNYFLTKEVCIQILSDMNVKKRFELQREENDTDFDMLETPSSRILNWLLRAGWLKRIEDYNTLVTNIVIPDYAAVMIDAFEKLNSEDASETDIYIQNVYATLYAFRNDPRASIGLLRTALVNTRRLNKALQDMLHNMNKFFAKLLQQDSYSGILREHLDSYVEEIVWKKYHILKTSDNFYIYKMDIKKCLREIRDDEAFIMKVQARSKMLGDNQDDVLDLLDLIERGFDDIEHRIANMDKEHTKYVRATVTRMNYLLSGETDTKGLVVQLLNKMSEDPDQMEEIITETGKRMNLSLLEILSEKSLYKRRKSRKDFISQLLPDETTGDLDKDDILRLNRIQMRFSKKQIEEFIENNMEDEVMDASKINIADEEEFEKLILAYDYSTRKNSKYKVLEEEPEMVENAGYRYPALRFVKRRAMSENIEKAVPTEESPKTKESETSAPAATDNVVLYPVADISAAQETTDTETAASKEITDPQNTDNQTTIDSKTTDGKASDNADKFSDTRNTKEFSKKDAEEDEDLEEDFYEQQEKSRSKDEHPFREFFSNFRSKRKIEMNRDEQILSRISDEDLMEYLRMEQKRMELLQQAKEVREKRFWTTFQLFICLLSVILVIYFLKDNPVILVTILYTVGILTALRIWSKSQNGKDHRDKKDSSDYHKKPWEMQILLYLTDFIVPLVIFGIVGYGLLMKVPVYDTFIKGAKKGFLTVIKIMPTLVGLMVAVGILRASGFLELIANGIGRFTDRIGFPGELVPLTVVKMFSSSAATGLLLDIFKEYGTDSYIGRIASISMSCTETIFYTMSVYYMTARVTKTRYTLTGALLATLAGVTASVVLAGMMTMLNYLWSFMILTGIVYAAFTGRMPDITNAALDSSKEAISLCITMIGVMSFWVGLMEIASKAGIIPAASRKIRPVIRFLFPNLPAGHPAEEPITTNMIANILGLGWAATPAGLKAMEELSKLEEQRRKHLAPGISRPAGTASNEMCTFLIINISSLQLIPINVIAYRSQYGSVNPASIIGAGIVSTLISTAIAVIYCKLKERMELKQETVKQIRGLIIFTAVLIVCLWKFDVVINAFQFVLNIVYPFLLGGAIAFALSVPMNFVERKLFTERKISEKYKRKYARGISLMLVIAGVTGILAMIIFGLLPQLAGTFANLGKSIQEFIPQVQGWADHWFHNNKEIMNVVNNLEFDWNKIMEAAAGFLKNGAGSVLETTINTAKNIIGAVGTFFIAFVFAVYILLQKEKLGRQAKKVLFAFVRKGRAEAVLEVLALTYKTFSGFLTGQCVEALILGAMFVITMTLFRLPYALLTGIVIAFTALVPVFGAFIGCAVGAFLIFMVSPFKALIFIVLFLVLQQIEGNLIYPHVVGNSVGLPSIWVLAAVSVGGSLMGIVGMLIFIPLMSVVYALFREVVYIKLRQKNIYPQDILMLTTKQARENQEKYGFNELVEGKKKSIMQIFLEQFKDFLVIILIISAVISGILGDAESAIVIFVVITMNAILGTVQTVKAEQSLNSLKQLSAPEAKVARDGNIIQIPSREVTIGDEVILEAGDCIPADGKLIECASLKVDESALTGESIAVEKNLDEVAVGTALGDQTNKVFSGSFVTYGRGRYEVTAIGMNTEVGKIADLMKNTSEKRTPLQVNLDDFGKKLSILILVFSGIIFGVNVFQGESIGSAFMFAVALAVAAIPEALSSIVTIVLSFGTQKMAKEHAIIRKLQAVEGLGSVSIVCSDKTGTLTQNKMTVEDYYVNEKRIPAGKINLKNENEKLLLRFSILCNDSTNTDGQEIGDPTETALINLGSNLGIEIMQVRERYPRLSEVPFDSERKLMSTAHRIQDDKMLTADHIMIVKGAVDVLLDRMDRIRVGNTVRKMTDSDCKNISMQNMQFSREGLRVLAFAYKHLEEEKEIGTEDEEHLIFIGMIAMMDPPREESQVAVAECLNAGIRPIMITGDHKVTAAAIAKRIGILKDESEACEGADIENMSDEDLKDFVEGISVYARVSPEHKIRIVRAWQEKENIVAMTGDGVNDAPALKQADIGVAMGVTGSEVAKDAAAMVLTDDNFATIVKAVENGRNLYQHIKNAIQFLLSGNFGAILAVLYAATAGLPVPFAPVHLLFINLLTDSLPAIALGMEPHSKAVMDQKPRPVNESILTKAYLVNIGTEGLCIGIMTMAAFLIGYRGQGAVLASTMAFGTLCMSRLVHGFNCKDDKPVIFSKRFFNNKYLIGAFVLGTVLITGVLTIPGLHAMFKVVTLNMTQLMTVYGLAFLNLPVIQGLKYLKGKTKWNMQKIRPDMDIGKNIQEIRYKNNMTQDQVVAKLNLMGISITKSTYAKLETNRMNIKASELVALAKLFHTDINAFFSGLLMTNDKKSSLLEQMRKSRGTYEAVFIQFVNNRKYYNSYAFCFYEGEDGKYYDPRIRQKFSDKFMTFIVGNKKEVIKLLKKINSEDLYKDVCTMFFVDRDYDKSLLGQQENIFETPCYSIENLYAQEECLKKILQSEFGLNMVDEDFQKCLQDFRFRADEFKECILEFNALAYLRRERSDSNSNCAFGSVKTSHIAKVEVAKVERASRYVDTIQDIKEKLQFSEEDIEKAKNILNEQGNFSMNFRGKNQLDFFVSFIKGLKELNNVGGYFSEKYNNVHINITSNRLSELSQYAITPSCLEKFLDVHFYKLQTRVKGIIMFQDDIFNEMRVENKLNETNLEFIGIYGLFGRYSIEIPFEKQVNIYIGENGLGKTTILNCIYFILEGKFSRLANIQFSEIIVKFKGDVKTYKISGADLREFNKKSRRQAYNHFIRDTDIYEMEILEDILMKNKLNMSEMEMENNLDFLIYEYASKMRVPENFARRRILEYYENTEIISNSKRKANKNNVIELSKAVKDKVTNRIIYLPTYRRIEDDFASLNIRSEELNKAELLIRFGMSDVQMSIDRILDKIRSLAMKGFTEMTGILLRQYADGKDPIDEMNQFTRMHNVNVDTVKIVLDRVGKEIEEPYKQKILNLISSGEIKEYKYLYLRNLINKLIDNYDIQKSYDDRIKKFASTCNKYLNDKHFDYNQSTLNLKIYLDNEYESERKTIQLTQLSSGEKQIVSLFSKLYLESDESSIVIIDEPELSLSIQWQQMLLPDIMRTNNCKLLLTVTHSPFTFANEFDFDAKEIRNYIKMYRMKSAEKITEEIVILRYYNVIFYLFFKPEVDELKKQYLVKKIDTGESVNMKQIQKWCYYHQIFFKTKFVYRKDYSVMANLWNFYSYYRFIIEKRLRGMWRIRYALQVLKDDRGIGVVEVILILVGILTTYMKAAGLIIALGILVTGADMACSRIQMTPSIERNDYGKGKKVEELDVEIGNKKKKVRTSVEVSERQYSAKEVQELFSRIIRKMDRLILAGNETLDRVDEDLDLVTDIPGEPVKVSWELDRYDVMDIQGKLKEQNISEKGVLVKLNAVLTYTANEKEQASYQCVACVYPKKLSGEESTKKDVEEVIKKADTATKEKKKLILPEMLDTNELRYYQPFNERGPVITVMGMMIGILLYALQKQNIRKAEEERKKQMIEDYPEVISKLTLYLGAGMTVKKAWRKITEGYMKEKEDENERYVYEEMRQTCHEMDSGVTEAEGYENFGRRCDLQIYIRLGALLSQNLRKGTKGLSELLKLESIQAFEERKARAKRLGEEAGTKLLLPMFLMLVEVLIIVIVPAFLTMQIMKTAGMIGITAWLYYRRVWAAIFLILPGIWLYREFLEEESKKKEQEFQKQFREMIQTLSSALNTGYSVENAFYETQKELKIQYPEEARISRELLLITRKLRMHIPVEQVLEEFAERVPSEDVKSFVTVFVTAKKSGGDMIGIIRNTTSQIGDKIEVKREIDTLLAAKKYEFQIMSMVPYGIIAYMSLSFSDFMEELYGNVTGIGVMTLCLGIYVGAYYLGVRLLRIDVMIEAEQLHARILARLDMTRDMEDEELTELIYEVLQEVSQEEYLPLDQKTMLGKELFNAFRKLDLLQEFLEDDDITEIMINGTQNIFIEKAGRISQSDKRFLSADKLEDVIQQIVAGSNRLVNEASPIVDARLADGSRVNVVLPPVALNGPIVTIRKFAKEVITMNKLMEWQSINSEVSGFLASLVAAGYNIFISGGTGSGKTTFLNALSQYIPKNERIITIEDNAELQIQNIKNLVRLEARNANVEGTGEVTIRDLIKSALRMRPDRIIVGEVRSAEAIDMLQALNTGHDGSLSTGHANSPKDMISRLETMVLMGMDLPLPAIERQIASGLDIIVHLGRLRDKSRKVLEVTEVLGYWDGQIHLQTIYRYEEIRKEDENVTENEKKDQENKVHGEWEKVAELFHREKLVAAGYYIMVSRNLVICDQEERYAAALAHFFMKTKELALGVQVCNSVAQALRLQEESPIDILLIGSGYPQEERQKVRAESVFVLTQSEDVAHETHEKLINKYQSGEAILRDVIEQCQESVEPGNFFLGTVKKEKVRIIGIFSPVHRSRKTGYALRLGKDLAKTYNVLYLNLEMYGGIGGHFPEIGQTVADALYYSRQEKKHLRAALAGMVKHMGPLDYLLPMRMSEDLKAVKIEEWMRFIEQIASQSIYEVLILDIDEGIRGVYELLRMCTEIHVAVIKEEVAQAKMFQFEEELHLMGYDDVRHKMIKKELEGMKKWGTKIAVNFLVRGIVSFAIIFFVNGFLDGQGISACVGMNPVTFLTSGILGFPGVAMLYGITFYQIMMGDKRKDYISWDEYFMGVAKLSGMRSKDPNTQVGCCIVSQDNKILSMGYNGLPTGCSDDVFPWGREGDDPLETKYVYTVHSELNAILNYRGGSLEGAKLYVSLFPCNECAKAIIQSGIKEVIYDCNKYEGTAAVMASMKMFDAAGVNYHKYHRTDREIKISLMSKVQVMDHPLIQHKINYIRNEEVGSKEFREIVGEIASLMCYEATRDLKMEDVKIKTPICEMTGKQLSGKKLAVVPILRAGLGMVDGMLNMIPSAKVGHIGLYRDPQTYEPVEYYCKLPSDCDEREVFVVDPMLATGGSCIAALQMLKDKGVRHLRFMCIIAAPEGVKRLQEAHPDVDVYIGALDDHLNEHKYIVPGLGDAGDRIFGTKMKIMKTIIEKIDKNQKNTDIIREAGRILKEGGLVAFPTETVYGLGADALNEDAAKKIYAAKGRPSDNPLIIHITNMKALDKIVSEVPEKAVKVAEKYWPGPLTMIFNKSDIVPYGTTGGLDTVAVRMPVDEIAREVIDAGGGYIAAPSANTSGRPSPTTAQHVAEDLTGRVDMIVDGGAVEIGVESTILDVTVEPPMILRPGAITKEMFEEVIGEVTVDRTLIRPDSKQVPKAPGMKYRHYAPKADLTIIEGPLEKVVKEINKRAKEKSEAGYKVGVIGTEETVADYKSGDVKCIGTRADESTIAANLFRILREFDDDQVDYIYSESFDTAGIGSAIMNRLLKAAGHHIEKLVMRKKIELAVLLLFLAVLVLLSKNLQKLVSSGNVTAKNKIIVLDSGHGGDDPGKIGVNQAKEKDVNLEIARKIKKRLEKKGWEVVMTREKDEMLGDPQAGNKKIHDMKARVEIINKTMPQAAVSIHQNSYQDEQIRGAQVFYYSHSEEGKRMAEQMQKALLTVDETNTRQAKANDTYYLLKRTEVPTIIVECGFLSNPEEAAKLTDTKYQKKMADAITKGIIACVENMRRRRQRNRMIQLVLLIILVIAAIAGIVIWKRYSPSKEQYDMKKYYGIEKDGQLGITVDNKVVEAKGKLSDGKAYVAYDVVRDYINSRFYWDSNENVLLYMLPKDMISVDVGSKDYSVSREKKSEDYVILKTEGNTAYIALDFVQQYTNIDYEMSSNPDHVMIRTKWGKTDVATVKKNTQVRYQGGVKSPVLAELKKKDEVTIIESEENWKKIRTKEGVIGYVKNNALKNEEKKNITRKFDEQNYSSISKDYTINMAWHNVTNQDANNGVAQKIAQTKGLTTLAPTWVHVADTSGNITSIASSDYVSYAHQQNIEVWMTVRDFDGGISSEQESYELLSYTSRRETLITQLIAEALRVGVDGINVDFEKISDKCGEHYIEFIRELSVKCRQNGLVLSVDNYVPKSFNTQYDRKEQGIVADYVVIMGYDEYYAGSPEAGPVSSYNYVKEGIEETLKEVPAKKVISGIPFFTRLWKETPKTEEELASEKGTDAAEYSVSVESVAYGMDNAQAQIKQAGVETTWDKKAGQNYATWEADGAKYEIWLEDAKSIEQKLKLMQKYKLAGTAEWSLGQESTDIWNLIQKYVNMSSVGGAAWKTEEEIAAHIITEKKQVQDHPEDRLRRAETEGHPDRRLEEDRQVGEVLRTERAMGEKEEMKEMFQELTGFEKKNISLRINGVPASPMQIVQAHTMCEHQSYMRDYVLNDKGDVKEVWFQNITIMIMKIEKISDNQIRCTLTRADLADRQLQLSELAYGTEKAKSLFRDMMQQAAFEFGFEAEDIPLMIEAIPSADSIVLIITKVEDPEELDTRFSKFAPSSIADAKKKNTPGKLEGAEGLLDLLGKVQESFEAQAAQTAKAASETSDDNTDKKDSGNNIRLFSFPVMENVLKAAHLLAPMYHGSNTLYKDDQEEMYLLALAQSDHSTADFNRICNMLSEYGALESASGATFAFLEEHCETFLSGNAVQQLANIMAQITKDMTFGELLSKYYSTCPKLVDDLMEAGMGCIGCPHSQMESIEEGAMGHGIDPDLLVAKLNATLEASQAMDSILKKGLFLVTVTGAITAFPIMAQAADIDDTQDMPTAGIEQVLGECYTSEKTISVKDYLVPTQKGEYLDMAFANVQSFLYIRSEPTTESEWVGKLYPDYAAKIIGPVGEWTKVQSGNVTGYVYSEYITVGNEAQKKAEELVQKKDTENAKEAFTYAESKEEEAARLQKEAEQKAEEEKKAAEEAAKQQEEQQTQAAQTGQAIVDYACQFIGNPYVWGGTSLTNGADCSGFVQSVFAHFGISLPRTTWDMENVGTAVSYDQAVAGDIILYDGHVGIYMGNGQIVNAINSAKGIGILPATYTNIVTVRRLVMAGLKYSKQRASIKDYLMHTTSHPTADTVYLHIKEEFPNISLGTVYRNLNLLADIGEALRIPTPDGGDRFDGRCEPHYHVVCTNCGNVFDLEMDDSYIQKINEDANKCFDGIIESHTTLFHGLCGECAKKLNENKMKKFVCTVCGYVYEGEAAPEKCPVCGVGADKFKEQTGEREWAAEHVVGVAKGVSEDILADLRANFEGECSEVGMYLAMARVAHREGYPEVGLYYEKAAWEEAEHAAKFAELLGEVVTDSTKKNLEMRVDAENGATAGKFDLAKRAKAANLDAIHDTVHEMARDEARHGRAFEGLLKRYFGMNDNKVKNLVITAFFTAITFLGIQSFRIPLPAAVGTPFLHFGHIFVVMGLLLQGGKRGAVSGTLGLTIFDMLNGYMQDAPKTFVETAVKCLIVGALFMMLKKKADGDKKKEYGAAVVCAFIYGCINVIMEFTMSTIAMMMVGSGFAAAAVAAFTSLPATVINAVFMVIAIAILYQPVKKIYVRMAMAEQLKEHIKDPGSAITHFIGMLMAIFAAIPLLLKAAREPSKIYIIAIAVYAASLILLYAASTTYHTFDKSRKVNTILKKIDHMMISVLIAGSYTPICLLVLGGKTGLILLAIVWAFAIAGILIKAFWVFCPKWVSSVLYIGMGWTCVLAFTQLLNSLSPAAFGWLLAGGIIYTVGGVIYALKLPIFNNKHKYFGSHEIFHLFVMAGSACHFVVMYAFVLMNYTYIVKCADSTLYTGWTNDLDKRIKAHNSGKGAKYTKTRRPVKLVYYEEHETKNEAMSREYAIKHLTRKEKEILIKGNGNLCGSWMVKGDMIKAGEFEKIKKLTREAKELAEMNKNQKPSMSKRRATVAAVLCFVAAIAIAGTYTFNDYRKTQKNELAKAEEKAKQDSEAAKETGTSKIKNEDMTSDTDESDSNGTGKDGTTTGSGTTDSGTTDSGTTGTSGSEGTGTSGSSGHTGTQATAGKSHNINFTEDSYILWPVNGAVIMSYSMDKTVYFQTLDQYKYNPAVIIEGAEGDQVLCGAPGIVKSIDVSAQTGTTVNVDIGNGYELLYGQLKEVPVKVGDYVEAKSVLGYVSQPTKYYSKEGCNVYFEMRKDGQPVNPVEYTADQDMWNRRYYYREKIKKAACWALIIILLPYIVTVFVNGPKIVTASKVDEMTIDVKGGGKMPVEKYCIGILARDMPAEYEEEALKAQAILVRTEVYRAIRDAGEGQKLEKEFWTEKQMKSAWGMRYAENYRKLKNALESTAGQVLFYEDGLAMTPFFNLSNGYTRDAKEVLGKEEYPYLKIVECPEDVNAEDEIQTVVLGEKDIGTMDVEVVETDSVGYVLKIRVGDNTISGEEFRNKYNLASSCFTLQRYNGKLRVTTRGTGHGIGMSQYTANEMAKKKKSYKNILKYFFNGTEIKEVTEIVKGVMYNPRFEKDVFKRDVRNNVKTLFRKEVEEATPQQLFQAVSYAVKEAIIDDWLATQKQYEKDDPKTVYYMSMEFLLGRALGNNLINMTAYKEVKEALEEMGIDLNVIEDQEPDPALGNGGLGRLAACFLDSLATLGYASYGCGIRYRYGMFKQKIRDGYQVEAPDNWLKDGNPFELRRPEYAKEVRFGGNIRVEYDETGKTHFVQENYESVMAIPYDYPIVGYGNHIVNTLRIWDAEAIVDFQLDSFDRGDYHKAVEQENLAKNIVEVLYPNDNHIAGKELRLKQQYFFVSASIQAAITKFKKKHGDISKLPEKVTFQMNDTHPTVAVAELMRILLDEENLGWNEAWDITTKCCAYTNHTIMAEALEKWPIDLFSRLLPRIYQIIQEIDRRFIAQVRAQYPGNEEKVKKMAILMDGQVKMAHLAIVAGYSVNGVAKLHTEILKNQELKDFYQMMPEKFNNKTNGITQRRFLMHANPLLADWVTEKLGTKEWITDLSKMSGLKEWLDDEEALKEFMTIKFKNKERLAAYIKEHNGVEVDPRSIFDVQVKRLHEYKRQLLNILHVMYLYNQIKEHPEMSFYPKTYIFGAKASAGYIRAKEIIKLINSVADVINNDRSINGKLKVVFIEDYRVSNAELIFAAADISEQISTASKEASGTGNMKFMMNGAPTLGTMDGANVEIVDEVGIDNAFIFGLSADEVINYEQNGGYNPYDIYNNDPDIHRVVDQMVDGTYSNGDTEMYRDLYNSLLNNQGGSRADMYFILKDFRSYADAQARAMEAYKDKEKWAKMALKNTACCGKFSADRTIQEYVDDIWHLDHVVIDEDELEYMYKKVSTDLNFVDREKQTEKFWEDNDIFRKSMRDREGNEIYMFYDGPPTANGKPHIGHVLTRVIKDMIPRYRTMKGYEVPRKAGWDTHGLPVELEVEKLLGLDGKDQIEKYGIEPFIKKCKESVWKYKGMWEDFSNTVGFWADMDDPYVTYDNNFIESEWWALKRIWDKKLLYKGFKIVPYCPRCGTPLSAQEVAQGYKDVKERSAIVRFKVVGEDAYFLAWTTTPWTLPSNIALCVNPEEDYAKVKAADGYTYYMAVALLDTVLGKLAEEGQKAYEILETYKGKDLEYKEYEPLYQCAYDCASKQNKKAFFVTCDTYVTLTDGTGVVHIAPAFGEDDAKVGRKYDMPFVQLVDEKGNMGETTPFAGLFVKKADPEVLKDLDGRGLLYDAPKFEHSYPHCWRCDTPLIYYARESWFIKMTEVKDDLIANNNTINWIPESIGKGRFGDWIENVQDWGISRNRYWGTPLNIWECECGHQHSIGSIEELKEMSDNCPDDIELHRPYIDDVTIKCPCCGKQMHRVPEVIDCWFDSGSMPFAQHHYPFENKELFEKQFPADFISEAVDQTRGWFYSLLAISTLIFNKAPYKNVIVLGHVQDENGQKMSKSKGNAVDPFDALEKYGADAIRWYFYVNSAPWLPNRFHGKAVVEGQRKFMGTLWNTYAFFVLYANIDDFDATKYTLDYDKLSVMDKWLLSKLNSAIKAVDYDLSNYKIPEAAKALQSFVDDMSNWYVRRSRERFWAKGMEQDKINAYMTLYTALVEICKTAAPMIPFMTEEIYQNLVRSVDESAPESIHLCDFPVVNEAHIDTELEANMDNVLKLVVMGRACRNTANIKNRQPIGQMYVKADFEIPEFYKDIVKDELNVKNVTFTQDVRDFTSYTFKPQLKTVGPKYGKMLGGIKAALENLEGNAAMDELNATDALKLDINGQEVTLFREDLLIESAQMPGYVSENDNGITVVMDTNLSEELLEEGFVREIISKVQTMRKEAGFEVMDKIAVTYEGTEKAEKVFADNASTIADETLALEVTKAAPAGYTKEWKINGEAVTIGVEKRMKQSKKVVARIIILILALFTVIPGTVSQKVYAEPGGSESNQAADASKDDSNKKEEKKEEDMTPEEREKKAEEDAYKMEIQSNGWKNWPKGPGTYGEAAIVMDAGTGSILYAKNIDEHEYPASITKVLTSLIALKYGNLSDKVTFSNDCISFMQPGDSSVGLKEGNVISLEQALYATLLASANEAAYAVAENVGKNAGHDYDWFIQQMNEECKSLGGNNSNFVNANGLHDDNHYTCARDMALIGREIWRYPEFLKICQEQSYKIPASDTTEEHVFPQHHKMLIKENKNYYQYAVAGKTGYTSNALSTLITLADNGNMKLVCVVLRTHGVNIYPDTKNLFEYAFNNFQKIQVADEKKPDEVEKFISAADSQSAVSAQSDGSEDTESVQTGGNEYQPLEDGYVILPKDVSYKDIDYEITDVDEDTGEGTIRYIYDGHQVGSATAKFTDKYLQKVSTRKERVDSKPKDVDNSGDSKKNGGKSSEKSIWKNFLQKVKAVWDFGQKKFAGKSSTEKYMIAGGCVALVILIFSLIVLLIRRRRMKFFRKHKKRKIAGIIILLIVLLIGGIYGSIWWKFYGDSVGVVSADKVDPNAKKVKIAKEKRKDKDVYNVLLVGTDSRDPDADRGRSDSMMMVSFNKKEGKSTAISFLRDSLVDIDGHGKSRLGHTYAYGGVGLTINTINKTYDLDIQNYITISFDDLVNVIDEIGGVTVFISEEEAAYYRENGMPDIQAGDVTLTGSQALAHARNRTLGNDFERTRRQRSVMYGIYRKIMEKKDPSALLPLINYAVNHVKTNMSVSEMYSMAKDVLSVDDLKMQQTCIPQDGTYTDITYEGMQVLKVDFDANKKKIEQLLYMGDYRDKSGSERVDAPEKIDLTNIMLDVYHGVKRLWWLFIGLIIICAVQSYFSVSTSYQSKYVASATVSVTSVGGMDYVNAQSAQQMAEVFPYILTSGVLKDVVAEDMGLDSMPGSIDVKADDGTNLLTISVSGNDPQMAYKTLKSVIKNYPKVAEFVLGETKLTILDETGIPTDTKRVEVIRGSYKRGALKGAIIGCVILLLYVLSRRTVKSRKDLKKNINLQDLGSIPYVRTKKRKKETFYNSVSLLNERISMSYLEAIRKLRIRIMKDVEKKEYQTLLVTSSIPGEGKTTLSANLAISIAQQGKKVLLVDCDLRNPSIAGVMNEQEPHPGLGSVLKKEVPLSEAITNVKLPKERTNENGSLHVIFGGAPDRENSLLIGSGRMRALIKDLKSKYDIIILDTAPSELLADAPLLGKYVDAALYVIRYDYTKLREIREGVESLALSGIDMLGYVFNGDNSSGGQGYGYGYRRYGNYGSYGSHYGSYGKYGAYGHYGKMEKGSTDKFGRVIKDMESNNRNDMPAFMDTDLDPYTLVHDIVSNWWVIILGAIAGALLTYVVVSSRYVPEYTTQATFVVSSRGDANAYSNLSSANTMAKTFEKILKSNIMEKKICEKLKVEELDADIHAKVLEGTNMLVLSVTADTPKESIDIIRTVMDNYSSVSLYTVGSAVMDVLEEPKIPYTPDNPLDAGGQAKKGGLVAGALVLILLGLFSYMKNTIKQENEIEKKLDARSLGAISYEWKYKTIRDIFRRKKKAILVDDPVASFRFVESYKKLAAKVEYRMAKNEQKVLVVTSVSENEGKSTVAANLAITLAEQSKRVLLVDGDIRRPSQFLIFGMEPKEENELGEYLRGNGSLADVMVPCTRKHMLFMGGKNCYSSSTEMLNSDSFYKLMTACRKFVDYVIIDTPPAGIIGDAQIFAHCADAVMIVAKQNYMLAEDINEVMDAFRDKEGKVLGVVLNGVRSFSGLVDSPVGHYYGKYSKYGRYGNYGRSKGMMRRLKIAVCLIFVASCVIFAGYTVKSKMLEDHTPPVITCKDKTVTLSVQTDQKKQKKALLKGVKAEDNRDGDLTSSVRIASMSHFIAPGKRTITYVVFDKANQVGTLERTIQYKDYTPPKIHLKEPLRYSTTEVGKANLTENMKAEDCLDGDLTSQIRTSLDDGMYNAAAGIYKVTVQVSNSAGDVCSVPLEVTVTESGDRQEQMKEYPALSDYIAYTTVGHEIDPMSYVKGMEMNGATYTYTDDGEALAGTREAISVKSEVDYSKAGVYPVEYSYTAEGAPTAVTKLFVVVQDQEVTQDGKMIDIHAHILPGIDDGAEDMYDTLEMARMAADSGVDKIIATSHCNIPGMYGNYFGREYIDRYESVVRAVRKEKIPIEILPGMEVFSTEDLPELIVNHKIMPLNQSRYILMEFAFDEDPEFADSILKRVEEVGARPVIAHAERYEFIQDYPQIAYRWFRKGYVIQANKGSFLGRFGGGPKRAADSLLRHNLISVIASDAHSPLQRTPYMMDVYEELSREYSENHLDVLFQYNPARICDNREILRLEPVPYSGRQQLYMELMEDGTTMERQMFAMAAEKKVPLYGVLELLPLCNLNCDMCYVRMSREEMEQVGRLCTIEEWTKVAEDMMKAGTLFVLLTGGEPLLYPNFRELYQKLRELGMIVTINTNGTLIDEEWADFFAENKPRRINITLYGASNETYERLCHYPGGFDKAVNGIRLLRERNIDVKVNGSLAKANVDDRMKIIELGESLDAPVRIDTYMYPSVRERNHAYNNQARLDPEMAAKARVEVLQKEMGEEVFAQYRKIQLDEAENTPEGEAVPGQMACRAGKSSFVVNWQGEMRSCVVLDKPSIPLRDVEFEEAWELTKKGTESLRISARCSSCKLRKVCNTCVAAAIAETGKADGVPEYLCRYTEATVRYLKETSKKMKRAYVRPTMVGERFVANEYVAACGDIEHGNYKFECNAGKKYPGVLNYHYKVRTKSGEVLPGKYGPCNATHEAPTNGDFIEGYIDDVYTIPDENIPVFIWIEGGTNVHCTTNLKRESWETTKSMQENNDKNQGKNGLSFESLDILIAKWKDGTFSEIIDDWKWIFSYSVRYKWAIVFYTILGIFSTSMGLVSSVAGKYLIDIITGYKTNKLMILIIVMVGSSLFSLLFSSIISRISTKLSIYINNDIQADIFDKIVDADWLEINKYSNGDVLNRFNGDIGTVSSNAISWLPTIVIAIYNFIATFLVILHYNAVMAILALASAPFMLLMSRFMIKKQREYSQKTREMSSKLMTFEVEAFYNFDTIKSFGIAPHYSRLMRWWQGKFKDVSLEYNMFSIKTNILLSVMGTGVEFIAFGYCLFLLWTHTITYGTMTLFLQQRSNLSGAFNNVVSIIPSFLNSSVSAHRIRELVELPKEMHISESEELDPFAEDGFEVLMKDVNFAYVEGTRVITDSYFKACPGEIVALVGPSGEGKTTMIRLILGLIRPQEGEAVIVASNGREIVLNAETRHFFAYVPQGNTILSGTIAENMRMVKEDATDEEIIEALKIACAWEFVEKLPDTINSALGERGRGLSEGQAQRISIARAVLRNAPILLLDEATSALDVTTERKVLRNIIEQKPNKTCIVTTHRPSVLNMCQRVYRVMETKVTELDEEESSRMAMDFMVEQNESIIRLYRIGHTEIEITAPLSMKSPRNLEKFRIGQAKRPDDEVIHYQVEMTENLDKIKEDLLGKKTGRVIYRDNLTVFQTSGGECRFINFLGMDWHYAVSSQEGVNQYHVWFVPEVAEMLDQDTVYLAAFSLEKQAIKDHSMILHSAYMCYEDTAVLFSAPSETGKSTQAGLWEKYRGTWTVNGDRSLLIREEDGWYANGWPVCGSSEICNNKSYPVRAIVMLSQAKENRISRLKGLEALRKVMEQITINAWNSEFQIQAMDELEILLKEVPVYHLECDISEDAVRCLEDVLAGGRGEEMKIVKEFILREIAGECVLVPTGATSQEFNGMITISDTAKFIWENIEKVDSLEEMIRMVLDTYEIDEETARRDTIAFVGALVENGFIECTREDGTWMRNVKVVDTREYVGMLKELTEEGKEVSMLVFGSSMAPFLIHARDMIYFKKPDRELQKGDIVFFRRKSGQFVMHRIWKIRPEGYYIVGDAQTQIEGPVKREQIFALITKVRRKEKWLEPGDFWWEFFEHVWLHMIPLRRGIMWCYAKVIRMNIAICDRYDTDITRISEFLDANIKKHMLNHALLEVDTFTSTDELLASPKEYSLIFLGILMPGTDGIEAARQLKDGPNPPIIIFTTKSTEHCLASYNLGVEGYILKPIREEDFEKVFTRLLLPIFPSTHTLNVYSNRLLYHIPVSEIFYIESIGRKCMIHTSRKTYETNMALNHIESTLNDNSFIRCYRSYLVNMNYIQDILDTEIQLTNDDCIPLTLRKRGQIVKLFNKFLISHSTSEMSSKITADSVLDGDLTSNIKYSLEKTVNTQAAGEYPIEFRVMDSGGNTVYLKTQISISDKSYAGIDVKLKDYLIYLSVGDAFDPNAYFDSADKEGELTVQSNVNTAKAGSMKETGESGSTKNKTVVLLLIILLILIWFVGEILISYHWMKVNRYPVTVRNLPYTDTVTDAGFKMVVISDLHDHEFGKDNEKLIRCVKEQDPEMIILDGDMLNEDSKSDEVPVRLVKGLAEIASVYYALGNHELDYIGTAEGKKMQKHPENSELVKDLTDAGACVLEEGYRDVEIGGCKVRIGGMYEYAFALDGDNSAENLTGDVRDFLEEFQNTDRYKIMLCHRPDSFVFGDASDYWKIDLVISGHDHGGQVVIPFKGGLYGGDQGWFPPYVHGLYRTGRIRLFVTSGLSSEKQKLPRWNNRPEIAVLNVHMKRKSILYKDLEVSRAKEIYDESCKNILANKIILAWIMKSCMKEYKDCSIRDIADHYIEGIPEISQREVHRDEAPASDPGKIRGENTEDKAVNEGTVRYDIMFRAILPQGQEKIELIINIEAQKDFYPGYPLIKRGIYYGCRMISSQYGTIFINSHYEKIQKVYSIWICFNPPEKRKNSINIYSVKEKNVVGKVKEKEKILENEYGITMTYEEKEEVEKMCNLSEYVWEKGLREGREEGLRTGINYGELQNLVRMVLKKMRKDVSCEITAELFEEPVEKIRKIYEVAEKYAPEYDIESICRELAAMQHTQQLFLEALKAALKNEQVEWNNKLEAQEWMDLFRMAEVHQILPMIYEAVYRSPAAGQADPQILAPAKAQMVRTVIMQTQKTGEFEPLYRYLRESGICPLVVKGIVCRNIYPNPDYRISGDEDLLIRPEDFRKCHDLLHEYGMQTSEQDMDAEELESVYEVPYGKKGSLIYIELHKSLFPPESEAYGDLNRFFANVHEDAIDIRIDGTDIRTMGYTDHLFYLICHSFKHFLHSGFGIRQVCDIILFANEYGDAIDWEKVLRQCREIHADLFAAALFAIGEKYLTFDPEKAHYPKVWQGICVDETDMLMDLLDSGIYGNANMSRKHSSNMTLDAVVADKNGKKAGNTVLKSLFPSAKKLEGRYPYLKKHPILLPIAWTDRILKYRKETVAGGDNAAADSVKIGNQRIELMKEYGIIKKMRKSGIYQYYVEGEDERSLLNTLKLDLRCIESGKIDKFNVIQSRFTTARMRTLKTGTTVVLVYDTDVEMNTKILDENIAFLKRQKGIKEVICIPQVRNLEDELVRACNIKNIVDLTKSLTKADYKRDLINCSNLSDRLKKCKFDITKIWAEIPKNNFKKYGNDSEKIKIKSKKMIIMDIKVDNIYAFKDFHINMSYPKKIVNSTIENEFLEERTNFRYKKVNIIMGTNATGKTTMGKLLMLFTNYLNDGGYKRFTNRIADVKKAAKLQIDFVTNENLLYRFEMNVGPKTQKSYTEEDVDIKIFYTPIETRDSYETCASRLDMYECEETTYEKVNTNGWKFSYPIDSSGDKVYSTIEENSKYIYILQQILKTLDSSVEEVVKVSEVENTYVIKWKNCSAIIKDGKIANGEVMSSGTKAGLEISYIITSLLCDMHDLYYCDELFSYVNSDIEKACLSIIIEKLSGRKQLFFTTHNSDILDMQLPKHSFTFLKKDVNNEDDSIKCIAASQYLKRSTDSLKHAVENDLFCTAPELHRLFEIADLMTIRQFIKKLFVTIIMIGIVLAAVLKVGYILICKVIVVIIFVVLAIRYWVGEDIRKAEEEKRGTWLFTLGFIGLTVLTMLAANIPGQVQRDQYLYLTKEHTEQLEKVLLREATADSERCIQWYEKQMLGIRNNKALGNPAMQTEDERRYKNRIDGKEVYRDPDTCTLRVKELKDGSTKDSVLINGPVGEIIAMRERIFYIDMEDHNVLKSVTYDGKQRKTWTKDPVKQFAVIGGYVICCTEDEKLIRCDMSTGKRKELADHIQYFFAGAKLYAQKGSKIVSVSYDGKEVRVFKKDVVMMDKKEDKVYYRRMDRKKEQMYVCDVDGGMEKMVGSRDMKKRFFQLVLTAVLSVSCVATGVNVSAAPLSSEGYSIEKVSHPERGAGETDGILSFDAMGEESNRNQSYVWSCVEHGNYIYLGTCWNPISGIYYRNLKNNLTKLFQNRGDENPAQKAGTVATNILNVVYNGNFPDGATSTNGTPCIMRVNKYTYETEVVYIEKESSAFVNWNGYRMAVEYNGKLYFACAGFPTSRLLQIDPETNETKVVMQKTAENSGFANGIRGLTVMDGKLLVSLATDGADPDNMFASGSQLPQAYQNAIKAMAKKDVRYKDDNPRMQGVRLLSTTNPEDVDSWSVIANQETFDNLPACWIRDSINGGGLWDLVPFNGSLYVSMVTGKTDATTGVNHKQGFAVYRGDPKADGTWNWAPIIGDTSKGAKYEFGLGKKESCAGNLFAYGDHLYIGGYNDPMLDLAEIGNAGDFQSLYEDLKNPACLNRMDKNENIELINDDGFGAASTQYLWRFSEYHGKLLIGTFDIATLASGFTQLTDGSLLEMTPEEFSQKMTYVKELLQSLKKTPSGAALTAEEGTTEEAATEDTAEDTQENIQENTDADNTANQAATEAAKDQEAVVTDNTNAELTDTEVDAIDQMLDQLDEIETLSSDDSQTAAYTQRNKPSDIVDVYMDMVNNYNKYVKPILNRLNPDLAQKIENNVFNTAFHHFVYYLGCSNIIHTQEKGCDVLISSDGVNFTTLTRNGFGDIYNHGGRAFIPTDNGLFLGMANPFWGTQLWRVTDGSENPTPDKPGTDKPGTDKPGTDKPDTDKPGTDKPDTDKPGTDKPDTDKPSTPGTTNPSGTNNGTTSGSTGNNTSNGQNGATTTASPKTTNANHANKKSTNGKVKTGDNNHMILYTVSLVLSLMIAAGCIYTIISKRRKNRMHKNKYDHNILLNDIQKLDKIQHKHSLVAIQFPDTSAEKKYLVYYDERWDCKLFLNYKTVDRADEESVINKVSADLNVDKSQINCRYISSKVQEKYSESHQENRIYNHRLYEIKIQVFPEDEQKENFVVNGRHYYWMSISDMERDPNIVKKNLDVIDFVKESMHAMKNKPHKLFISHSSKDAEYMKAFVDLLVAIGVHKNQITCTSVPQCNIPVGCNIYDWLAKQFQTSDLHVVYAFSDNYYSSVATLNEMGAAWVMRCKWTGLLLPGFTFNKLAGCIDKNQICIKLDDPDIITLKQRLRQFRDDIIKEFGLESIDEDEWEEKRDDFLDKIKIIAQQKNVKTTPSNPVNGSNNTKGKTRFDAPVAQRQEIDLLKDYTPFSKVKPIISCGDEKVAKIKTFADCFDMDVDISNVTKRGMGEFAMALMKYIPCDNWTGFFDAGYAIEFDAFASGAIKKVQLEIKNDTGVKIIDEENDVRIGGGHFKYRFRDKVRNREALEKISEVCFTVFFAESYIDGEKGRLSIRNLKVTPAYEMRENVTVIFKSFERQKMAKRLYENLQKYYPGVRVVIADDSRKPLDLKGDSLTIVQLPFNSGLSYGLNQALERVDTPYVMRMDDDELLTVRTRLGKQVEFLERYSEIDIVGFCVLTAIRCQNPDEAVSEFTRFSMKDAPKPLLIPHMTRVDGNHFVMGKVPNVYVARTDKIRSIGWDSNIRMMDHQDFFWRASGNLVTTIALGTAVFHYHNPFDRYYQRFRQDVSGDKEYIIKKNKKFMFMTFYNVDMEKAKNINDLLEEYERMEAIIDLFFKKDVENKELEELRRWLTVSINYFRRFQKVLSILKIKDEKINIKEAEEKEFLIEKLYLLLIENGKIRSNQKIKSINDVEIDKAVIGEPIFVVYVNEQNIDLFGNVITFYMVSSIFNAIAEDIKKDENGKKKLLFSDTDSNPMYRVYSGFLNKKEAEKEEKRVINKIEEYKEAKTLEEYLEQLREGIVMILVCGIHGSGKDQYSNNLKLKKDMNTYTASQLINQTLPLRQYKTKKIDQIDSRQHILLETMKEIVLHEENFILNAHLCLINEKGEVERISTDVFKNMPITEIHLVECSAKEIEQRMYRRDEISWDIRFIQSFLEEEKKYAIELSQLLNVTLSVINTSSDNKKNIILPIAPQYIEKILSGEKKYEYRKRLCKNNISRMYLYATAPVKGIVGEAEVIGKLEKNPKDLWNLTFQDSGIKVELFYKYFENYSRACAYKLGTVTRYANIIPLHNIGIDYIIQSFKYISDIMKFINNKLYINYSELSPEQKSIYRMRIKIFLKKLVYEYNNFEEWFSQLFISDILLKNDREIIICECDYQLAGVAILKNDDIEKKICTLRVAKRFQKQGIGQHLMELSFEWLNDDKPLITIHNSKKHEFNKLFKRYNFELEEKKWGYYRLFRTELVYNGSLPEKNFFFNRMEMIDLEKEIRQFLLSGRDDFKLFIDEWLYRQWLYSQKEINIITGYMESFGFWYKLVEDKDDKNPEFDLHVNFWFLGDILKGKVKNPYLDIGIKIQNYKNLSNLVFSFPFHVPQKNLVDLASKMSVKNNASIVFNEECEIETQKEYTLIKIPGKEKTDDKKLLIFPLEQAVENIYELTDYKEKSYITVKFDEFRTYLKNSGSDLERYSDIYIRFRIQNIDLENILYFDSEPFNKSLDSAFSGTRVLDFKINEKRNIDKNITARMEQKEELLVEFGQIHFLVMEPSSYDMVSYTQNQMSCRELEKDLWNEYLKVDLEDKFGHVLAYHWKKKASDQSKISDFSCFAKINYQKMQMKTVFAYVLVVLGLGVAGSTIVSATPLINTFSQRLSGGYNIVNLIMDLALAVVMIFIGWRVGRSKMIDRSRSEYSIMNILTGFGGYFLNTLLGYICRIVFVQCLNADYLGINGLLTNILSMLSLAELGIGGAIGYALYKPIAEKDNEKIASLMGFYGKAYRIIGCVVALLGLFMIPFLKVIIISPPNISESIYTIYLLYLFNTASTYFFSYRSALISAAQKNYIVLGLNYIITIIQSVIQIPLLILTHNYMIYLVVQTVGTFIFNFLISFIAKKMYPFITQKNAPALTKEERKKLFVNVKALTINKLSSTLVNNTDNIIITYLKGLISVGVVSNYTLLVNTLGALATQIFNGLTASVGNLNAIENKEKKYSFFKVLNLTNFWIYGWGTIGILFVCGDIVKLCFGNSYVLEFNIPLILAINFYMLGMQNAVWAYKNTMGLFKYGQYLLILTAVINLGLDFLLGYKWGMFGIYLASAISRLLTNTWYEPYAVFKYGLKINPIYYVKKYMEYIGILCITGGICYILCRMCHFTVLINVIIKILICSIVTNGMFYSCYHKTEEGKYLLNKAQKIMGRFKKRKMVSIEGCKENFKRSQKVTIRYFILCGPFAIILYRRFDKERILNNRHLRMIWIMVSLIIPCYNAEKYIGRCLDSVLNQTDRNIELIVVNDGSTDKTARIIEDYRHVLESDITRFIYISQENEGVGAACNNALKKVTGEFLTLLDADDIMLPESIEIRRKWLEEHSTYGLVRTNGYYVTEDNLELCNRLLEVNEYMKNKENVFNELFNGTTYLWPGTYMIRMNVLDKLYPDREIYPSRNGQNMQLVMMAAYVSKAGFIDIPLMKYVLQKESLSHFSSGNVMQKELNAMEGYKDIRKHLVKQFMNEDDQDKWNDKIDKLYANIYLDIALKHKDKDFAKSCYENIKHKGNIEINQQINYYKLMNPVVYWCLRIIRKLGWRPKKENYDKKINDMSCNISGLKKEKCYGCYACYNICPLNAIDMLEDEEGFEYPKVNEEKCINCKRCLRACPSINPPHVNSDTAAYACYAKNQEEHMSSSSGGIFAIIARKILKNKGMVFGAAFDNQMQLGHISIEDNNELYKVKGTKYIQSSIGTTFVKVKENLKKGRMILFSGTPCQIAGLKAFLNEDYDNLLCVDLICHGVPSPGVWKRYLKEQFGSNKVISMQFRNKTRGINDVTLDYTLTNGSVFRERYKESSYIQGFINNYYVRPSCFECKFKGIDRCSDITIGDFWSLKEFHPEMLNQYGVSSVIIHSKKGERWFKDCLDQLVYCVAKTEEIAIWNESLINRIDKDYYRNQFYEMWNNKKIEEIVYELNQSKIKTRNKQNKAIACIKRIVRRIKNGMRIALYGNGSSGNHGCEAIVRGTYTLIKEPLTILSEEMDEDIIYGLAKFCNVLDAKNGKISKARLIRAYMKLKLKNNYTDMDGLPYVDSIKKIKGKVDFALSAGGDNYCYENQAFYAFLNKEYQKKGIKTVLWGCSIEPEVIKKKKVLEDLKSYNLIVARESITYQSLKEIGANVILNPDPAFYMKSEKCILDKRFENGDVIGVNISPMIISNEKCNGSAYENYRKMIEYILNHTSMYIALIPHVVWKQNDDRTILQKIYKEFNYNERIILVNDHTAPQLKYIISKCRIFVGARTHSTIAAYSTEVPTLVVGYSVKARGIAKDIFGTDQNYVLPVQELRNGEELTNAFQWIQEREIHIRKHLKETIPNYVEQGRKIKTILEKIMRLRYIDFTKGLAIILMIFGHTMSKINCLHIWIYSFHMPIFFIICGIIMCRKGRQKSYSLLKEKIIRRWYTLGIPYLFFGGVLILFYTILDLLDGQPISFFSRLLRVITFQGIDALWFIPVYCFSEIIMKIIYKYKWRDIIISFVFLIICISTKSTIHIGSTIYKIMLGICFVEIGILIEQYLIIEKLGRIKYILLIIAAMLAQVNGSVEMIEGRIGNPVVYFLCATMTSVSVLALFKNAESNNSKLLLVLEKYGKNTIVLLVTNNLLIEMIRLIDYKITGNILIRLGIFGSILFTVGLLIIEWWFIKVANGPLGFLFGRMRKEERMKKKILFINGHLDSGGCERSLIDVLKKLDYKKYEVDLLLLEHTGDYLEEVPEEVNIKVYSLDNAFGRLVPCLVRAIRKKDWFSFWFRVEYICGTKVSRHFMVCMRKLFKDLRKSYDIVIAYRPGICTELAAFTFQANKKISWWHHGEMNLSYHEIKSLDMAYKKMDSIVAVSNSSKKLLEEQFADIKKKLYVVSNMIDPVELIKKARKYMPVEFQNTKFKIVSVGRMTPEKNMLLCPKIGCKLKAAGMDFKWVIIGDGVEKEKIEKEINDYELQKELILIGRNSNPYPYIAEADLMIHPSLVESQGITIIESMALGTPVVAVRSKGPEEFIESGKNGYLVDNNEVDITNLIKILYKEPKKRELCAYNATNIIKQFEPDCIIKKIEELLDEKLMKKISVIVPVYKVEAVLKKCLDSIITQTYENLEIILVDDGSPDSSGEICDEYSKRDSRVKAIHKKNAGVAAARNSGLKVATGEYCIFVDSDDYIEPIMYQSMIQIAEEYDCDVVMCDCVKEHKDEQQIYTHDIRAGYYNRTQIEKEYFPHLLMMENIEYPPTISNWLCLFKRVLIEEEKIYYEEGIRYSEDLLFGAEMLYHANSFYYMKGKYFYHYWMNPDSATHTFVSDKWKDYKKLHKRIKEIFSECQIYDLSHQIDLVLLFFVYNAVGDIISTSLLSKKEKIDKCKRILLENEVQEMFERIHILKLQIPIKLKILTGIYKYRLGINALILKKNKMKKKILFIMPSMFIGGAERSLLGLLGSIDYSNYEVSLFLYRHEGEFLELIPKEVQVLSVMPEYGTFDVPIKELLLSKKWKYGVARLWAKFSMKIHCIKEQENTGVWMAMQYISKSLLPLLPKIPGKYDIGISFLGVPDVLIERVDAKVKVAWNHTDYTVLNPNKKRDRELYSKIDYIASVSTPCTEKFVQIYPEFKDKAITIENLLDTNLLENQANEVREDLFPNKKGKVLLSVGRYSDAKNFDNVPDICKSILETGIKVTWYIIGYGGEEGLIQKRIKEANMEQNVILLGKKSNPYPYIKGCDLYIQPSRYEGKAVTVREAQILHKPVVITNFATSASQLQDGYDGIIVPMKNEECAMKIVELLKDEKRMNQLIDNTYKNDYSNRQELEKLYALIKMKPYFRVTWNVLKYNLIKFFKCKNLKIRGIVLLGYNTKLQVHKTSQICIGKNVVSDGRCVIIADKNAKVEIGDKVYFNENVMISAKKNITIGNGCQFGPNVKIFDNNHQFNKEKGVLFEHTMGDVIIGNNCWIAANVIILKGAVIGDNCVISAGCVVKEYIPPASIVTQERAIKIVPIEDRELMIPKKIHYCWFGKNELPTKAKKCIASWKKYCPDYEIVEWNEDNYDVYQNAYTTYTYDNKKFAFLSDYARLQIILREGGIYFDVDVEVVRPLDELLRYPAFFGFETEEYVNTGVGFGAERGNKIVEGMLKEYNPLLDGKHGTRGCPILNTEALEKKGLIRNGQKQQIEGAQIFPIEYFNPYDDPTGRLNKTTKTYSIHWFAKSWMGKKEILRSQVLKPIHRMFGKDVFRRRMALLTVFTPAYNRASTLPRTYQSLCEQECKDFIWLIVDDGSSDNTRELVEGWKNQDNGFEIQYIYKKNGGMHTAHNVAYENIHTELNVCIDSDDRMAEGAVKKIKTAWLKVRNKNYAGLIGLDADMNTGRIIGKGFPDGLRETTLGGYYASGGEGDKKLVYRTDVINSVPPYPVFEGEKYVGLVYKYTLIDQKYKLFVLNDVLCDVEYQMDGSSNTMFRQYLKNPKGFAFLRKVAMTYPISKKRLIRDCIHYCSSSLIAGNKNYISESPRKVLTVLCTPLGWILTTVIKKKCKLIMIRVLHVVTYMGRGGLETMLMNYYRHIDRSKVQFDFLVHREFEADYDEEIKSLGGRIYHVSRLVPWSRRYKAELRRFFRTHPEYKIVHVHQDCLSSVALQCAKECGIPVRIAHSHNSNQDKNIKYLFKRYYMRKIPETATELFACGKAAGDWMFGGKTYRLLPNAIAAEKYIYEEEKAKKIKKELDLEKNLVIGHIGRFNPQKNHKFLIDIFEKCFEKNQKVRLMLIGDGEGRKEIENKVKERGLQDNVIFMGVRRDVPELLQAMDVFVFPSLYEGLPVTMIEEQAAGVPAVISDRVSEECIITKDLVKVEGLEETPEQWAGEILKQVKISKRDRSEEIKKAKYDVETNAKWLEEYYLRKAEVNMDKNYILIIGWVAVMAMLSVLTAVKRVETVCGKKEYRWRPVWAVVTFLPLIIWCGYRGNIGDTWAYKKSFSEMPVSLGGIASYMATVKKDKGFYFVSAVIKCIVGNHVNIYFIVLAAIQAGVLIYVYRKYSSRYLLSFFLFIASTDYISWMFNGIRQFLAVTITFIGIKFILDKKYAKAIILILIASLMHQSALLVIPFIFIAQGKAWNKKTLLFMVAVIAIVAGIGQFTNVLDSMLAETQYKNVVSDWQSWNDNGTNALRVLVYAVPSVLSLIGLRFIRNEDDKVINLCTNMSIVSVGFYIVSMFTSGIFIGRLPIYFSLYSYILLPWEIDHMFTKRSARLIYVVMVVGYLGFYLYSVNNLLGMFRKSYWKKRFAPVLAGALVISSLLVPPGHAFAADPVTSEEQTVSPETPEVKDVTDSTDAATTDANLTTPDSVSDSVSDSVAGTSATDASSGKEAAKQDVKETKEVKAADDAVTDPIPDKTPHLVYGDKSLADEDAFVLLIFGDGFTASEQDSFYTNAQNTADYLMDTSPWDEFKDTIKIYALGVVSNESGAKADTAINQEQANADTRDTYFGSSFWSGGMQRLLTISSDGSKKAKQLSDQYLPAADFNVVIVNATTYGGSGGSVCVASLNNESLEMMLHELGHTTAKLSDEYFAGASYAAEMPNMTAESDPAKVRWSRFIGKNGVGVYEYDNGGNGWYRPHQNCKMRFLGKQYAFCEVCKEQIRKTFCQDSNVTKLFFQPYADMFYESDTGKDMREYFILRRGKNEITGDKLGDALTLTYKDADGNVVSGIPNKAGTYTIEATFAGDSTYEKCSQTAAYTIELPDLITLDVPSKVYDGKPADLNYTVNYDKDYTVKAHYKGTVPYAAEITYNYDSDDAPITPGRYKVTLTAYDKATGTAISSKTKDYEITFKSTTLQNNDTADYPGAMPYYNNKTIVFSGEGYTAGEQSQFEDVAKDFVKYFRSTEPFKEADTYFNYHTVETVSNESGIGQKAKDTYYKLTYDKNGKIVPTDESTAGAMYIGNNIITSYYKATIVIVNDKNVKTGTTFKNKRFTIYTTADEAGMQFAANELRNYFTNHEEGYTPSTDAEKDAERTEFLKALYYTWYGSDYAPVLSRAYDETFTENGSPIDLAPYFHTYVLGKEVEGVAYKMTYYADDNGAVGEELSEVPSKAGTYHAKAELVMDDVSAYGEPCKKVTLDGETYSLPLARGWTTYTIQAKDDPENPKPENPDPENPDKPDPGTPDDPKNPGSDNPGQNLKPNQNLNNNKNTTKNININKSTNGKAANKAAARTGDQSPVWMYTLLSLAALAVIAAVICKRRFRRMFKEDHLSFRQRKYMKVKNIIGRALGGIGLVVLSPVYLAIIVAIKKEDGITAPVFFSQKRVGIHKEYFNLYKFRSMRTDTPHDKPTHLLENPDQYITKVGHFLRKSSLDELPQLWNIARGDMAVIGPRPALWNQDDLIAERDKYGANDVKPGLTGWAQINGRDELEIPVKARLDGEYVKKMGPLMDIRCFIGTVFSVLRSDGVVEGGTGAKKKLMVITNHSYMLWQFRRELIGKLMEDYDVIISTPFVGHEDDFKAMGCTMIETDVDRRGINPKTDMKLYLTYRRLLKEHHPDMVVTYSIKPNVYAGYACRQMRIPYCVNVQGLGTAFQKKGLREIVIRMYKTALKKAKTVYFENKGNAKVFLQEQIIRREQMCLLKGAGVNLKYYTYQKYPENDKVHFLYLGRIMKEKGMDELFYAAKELQRKEVPFVLDLVGFFEDEYKEKIDKLVDAGIAVFHGFQEDPRPYYAMADCVVLPSYHEGMSNVLLEAAATGRPVITSNIPGCKEAVDDGKSGLLCEAEDWNDLYRKMSKIVQMSRIEREAMGVCGRDKMAREFDKDKVVKKTIQGIERVMKKKEINYQLLIRRIGLIVLDIICIIAASILALLTRFEFDFSQIPKEFLKVIYKYGPFTIVITLIIFSLFRIYSSLWEYAGIEEVFSLIAACLVAAVAKIVIILFTWSVMPRSWYVLDTIYLMILIGATRVSYRLIRLRRQNRTFPWSKRKKVMIIGGGEAGRSLITEIQNSKYLDQKVVCIIDDDPYKIGRYIKGVKVVGNRNSIKKSVKKYNVQQIILTMPSANAAKIRPIVEICQDTNCELMILPGVYQLVNGEVKASKLRPVNIDDLLGRDEVHVNLNEVMDYVSGRVIMVTGGGGSIGSELCRQIAKHSPKQLIIFDIYENNAYDIQQELLREQPKLDLVVLIGSVRDENRINSIFEQYRPEIIYHAAAHKHVPLMEGSPNEAIKNNVLGTYNMVRMADKWNAKRFVQISTDKAVNPTNIMGASKRICEMIIQTYNKESDTEYVAVRFGNVLGSNGSVIPLFKKQIAEGGPVTVTHPEIIRYFMTIPEAVSLVLQAGAYAKGGEIFVLDMGEPVKILDLARNMIRLSGYKVDQDIKIEFTGLRPGEKLYEELLMDEEGMTDTPNKLIHIGHPIDVDEVKLAHALRVLESAAQNETDDMRLIVESIVPTYHPKLNKSTQMPVTTICLFSSNFLLILKCYNNVFPVCHIFKHTLDYFLCILVGYIADFICYVANDVVQIQMNLPLRILALLLAQLMASMGVALYMVADMGIAPYDSVAIINACFNGPLIQFFKTKLERFYKMKQLTIKKKITLWYTGIIAVVLGTILVLVLLFVDKVGISATEEEIIAAVTGFSSNINFQDDSFYLDGDTEFYDDGIMFCIYDKNGRLLYGTIPTQFPEETILKSNTPRMITGSNRKWMIYDSVYTYGDDEEMWVRGITSVHSIELFMQTSEKMLLIVFPLLIILIGAIGYFMIKRALRQVDLICDEVENISNGKDLSKRLSLPKAKDELYELSEKFNEMFERLEFSFEKERQFTSDVSHELRTPVAVIISQCEYLLENENLSAEDKEEIAVILKQAKRMSKLTSEMLMIARNEQGEQHLMEKLDFGLLSELVIEELQTKAQEKNIEITLQKQDDLFMNGDQTLILRMMINLITNAINYGKINGHIHVILKVENDQIVGEVKDDGIGISEEHLDRIWERFYRIDKSRSRENGGTGLGLSMVRWIVNLHNGTIHVESIEGIGTSFIFRFPKIMKKRTLAHENDWYYNNYIMRLLIVEDENDLRNIVKKRLVKEHYSVDACGDGLEAMDYIDMTSYDGIILDIMLPGKDGYEILRELRRREDDTPVLLLTAKDSIEDRVKGLDLGADDYLIKPFAFEELLARIRVMMRRKPQFTSNQLKIADLILDRDTRKVTRAGNEIDLSAKEFMVLECLMRNKNIVMTRQQIEQNAWDFDFEGGSNVIDVYIRYLRKKIDAQYEQKLIHTVRGIGYVMRENEMKKILVVLLSLTLIFAFTGCTSSNHGAAEDVEIKTQKVVTSNTDDDDDNISNTENTVENANEKDYDFSSYENDIRNITKSVNNAKRSTNASENHEQFYALKKQVDAVDDELDKLDDEFEYAYQMKEISFETYKARERAIEKLEDELELAEEALENKYGIDDMKEECIICKAPLIYLEKDEMMECVLCHKKELSKTRCEQGHYVCNECHTKGMGVIIDICLSETSKNPIEIIRRMMAQPFCHMHGPEHHVMVGSALLTAYKNAGGEIDLPEALLEMMNRGKAVPGGVCGFWGACGAGISTGMFISIISGATPLKNEPWGLANKMTSKALDAIGSIGGPRCCKRDSYIAIISAIDYVAENFNIQMEKPVIKCIHSDKNNQCIKERCPFHEMEAKDMILICKALSDTNRLEIVRMLSDGEKCGCKILDKFNITQPTLSHHMKILVDCGIVNDRKEGKRHYYSLNKKVIREASSFVEALGRMTMGEKIKQLRSANGFTQEMLAEKMNVSVRQLMRKSDWAKWLIVIPAMLGIVLVTYVDRITDIWGFGAFICQLIAILELAYGMRIAMLAQSRKKSYRLTPEERHEYAQYLYEKQYQRYPAVANQMLLVMARMSILLDNYERATQELEDICIDKFNPAQLKVYYYLKVVTAVVAGDTEGLQESQMRYAGIPDTKCVYPTETELAEWIEQRDTVQMAEALKKAVPDKKEHPVRISIITLILAYSTFFYGLWYGINRDMGYEVRYRFAEISIAVITISLAILLIWGIVSLYRHNCQALSIQPGKNRVALMIIFGAAAIFTLLIIGMSGLSVVFGMDGEETVTGHDSKYTYITVQEDYGGERRYRTNNPFVMQSMDGLWWSSDSSDIMDAEEDNEESSDADTEDFPVTEDTQNGDVVEDYEAEGQHDGLTIQNAMLAVYNYLQENNALQNMAFSYTANAKGEVYGIVSETQETKDGNTVNVRYCLYDNGAKTDADGNSCEELVLEKVYPDGNYETELVDFYLVNTDTMQVTDEQKNTWMEIKRDAYLQQLIERKDNGMIKVITGIRRCGKSFLLFTIFKRYLLENGVDVDHIIEIALDGIENEELRDPKVCFKYIKDAMKDDGKYYLLLDEVQFMPRFEEVLNSLLRMSNIDVYVTGSNSKFLSSDIVTEFRGRGDEIRIYPLSFAEFYSVYDGDYDDAWDDYMIYGGLPQIVSFQSERQKADYLKNIFANVYLKDVIERNKIQNVDEIGILVDVLASAIGAPTNPSKIANTFASERQMTYANKTISKHIDHLTDAFLISKASRYDIKGRKYIGANLKYYFTDLGLRNARLNFRQQEPTHIMENIVYNELLIRGYNVDVGVVDIFDKDKEGKRVRKQLEVDFVVNQGNQRYYIQVAYDMTSEEKQTQEFNSLRNIPDSFKKIVIVNGSKKPWRNDEGFVIMGMKYFLLNANSLEFMFDKHKRESLLLRDLLKKLIIIVIGSIVAAYGITLALYAGFGGATLAVLWQGIAETFHLSIGMASFVVAVGMILFALIYDKSQIHIGTVLYQIVYSTCVDVFATCHVYSTYRWFNFFIMLLGVILFAVGTGLYASASLGRGSYEAVTFALAEKNNWQVKIVRIALDILVVIIGVLLGGKFGICTIITVIISGPIIQFVNAKAKRILKIMSKDEYLITDVPLKALTVFAMPMILGSFFQQIYNMADSIIVGQFVGSSALAAVGACAALTNVFICVALGAGVGAGVLVSRYFGARDYSKMKTIVSTSLISFLILSILLGLFGFCFSHPMMSLLQTPADILDEAVLYLRVYFVGFPFLFMYNILSTMFTSIGESKIPLGLLIFSSVLNIFMDLWMVAGLGLGVFGAALATLIAQGISAVFSLLIFFSRMRRYKSHFSWFDGQELRSMLRIAVPSVLQQSTVSIGMMIVQAVVNPFGTQALAGYSATMRVENVFSLIFISIGNAVSPYVSQNLGAKKNERIKKGYHAALVLDLCFAVLAFIVIETLHTQISSLFLGKDGTALAYQVSGDYMRWLGYFFIFMGIKMATDGVLRGLGIMWPFLIANMVNLAIRLSVALICAPRFGIAFVWLGVPAGWLANFLISYAALRKLWPIDKVDSIMPVYERQEITDDLHETCGFRTDYQFITKRKMKGIQKERKMKTKWKVIIAVILAVVISVGSISAYKYITSPKEESIPLETTLEDAAELTTQKMIISDVFKSTKGNIPLINKNKFLVQYKTTVTAGLDVKKAKIKETDDEIRITIPHCAINEDSIKIKSSDLKIYDTNFAIMSIDKEAVIEVVAEAEEKAKKKAESDEYGFLDNADENAKKVIKGMFENVAGERKVVVEFKMKEDKNESRWDKLLNIRTMGRDDTHADQYRYPYEPTPYSVLERLANAGYIRKGNILLDYGCGKGRVDFFLSYQTRCKSIGIEYDERIYEKAAENKKDAVSSGRVEIELANAEEFAVPETADCMYFFNPFSVEILRKVMARILESYYAEPRRIQLFFYYPSDEYISYLMTVEELMFTDEIVCMDLFPGEDPREKIAIFELDYMEMKIYVDADACPVVAIVEQIAKEYEIPVTLLCDTNHVLYSDYSEVVTVGAGADAVDFKLVSLCHKGDIVVTQDYGVAAMILGKGAYGIHQNGKWYTNENIDRMLMERHLAKKARNAKKKHHLKGPSKRTDEDDRRFAESFTRLVEKRLKTEDEAMNKQKKKGFTSDTLKETAVMTIAVGIIAAAVYFFLIPSQTSISSISALAIIIAHYVPLHVSTVTMILNVVLLLIGFVTCGKEFGAKTVYTSILLPVYLAVFEHVFPDFESLTNSNELDVLCYILVVSIGLSILFNMNASSGGLDIVAKIMNKYLHIELGKAMSISGMCVALSSALIFDKKAVVLSVLGTYFNGIVLDHFIFGQNVKRRVCIITKYEEEVRQFILHELHSGATFYEAMGAYNMQKYREIITIVDKSEYQKLMNYIVQKDPEAFVTVYTVSDMRYRPKVRSFMNIYDIVKTYSENTLGKFSKHDALVACPSLGSSSVESALKKLVDEGTVIRTGAGRKKMYMMKKEMIRKLLNGDIDRVADIWLKTNLKAHYFISNQYWKSNYELVKEMLSQSEVYVFEADKMIQGFVGLNDEYIKQEYGVLQAVGMTNKQLNLCLQLQGLIFTVGTICVALIIGLPLGYALFSYAKHNGIFGMNIYHVPIVPIFIMIFFVGLLQIVLSCVLSSNLKKETLVERIRYQGMITSTSNARIKRLVNLKKKRKLRDEEGVFLVEGIRMFREVPLDKLKEVYVSESFYKKEKDTVKEVLKDSKIRVEELTDTVFSHASDTKTPQGILCVVEQMNHKISELTSAECPLIMVLDHLQDPGNLGTILRTAEGAGVTGILMDRECVDIYNPKTIRSTMGSVYRMPFVYVEDLGKGIQDLKDKGITTYAAHLEGKHSYDEEDLTNPCAFLIGNEGNGLRREIADMADCYIKIPMLGQVESLNAAIASSVLMFEAARQRRKADMKVIYWLAIFIVLLIIEIATMGLTTIWFAGGALIAFGAGLVGFGLGVQVGTFIVVSLLLLLLTRPLAVKYFNQERQKTNTESLIGQQALVTEDIDTIKAKGQVEIQGQIWSAKTDEPDGTIPKNTVVVVNGIQGVKLIVRAREEMIFGLILLAIIICVVISCVKIVRQAQALVIERLGAYQATWGTGLHFKIPIFDRVARRVDLKEQVVDFAPQPVITKDNVTMRIDTVVFYQITDPKMFCYGVANPIMAIENLTATTLRNIIGDLELDQTLTSRETINTKMRASLDVATDPWGIKVNRVELKNIIPPAAIQDAMEKQMKAERERREAILRAEGEKKSTILVAEGHKESAILDAEAEKQAAILKAEAQKEATIREAEGKAEAIMKVQQANADGIRFLKEAGADEAVLTMKSLEAFAKAADGKATKIIIPSEIQSIAGLVKSVTEIGADDKKEEKMDLKGRNFLTLKDFTPEEITYLLDLSAELKEKKKKGIPVDKYRGMNVALIFEKTSTRTRCSFEVAAHDMGMGTTYLDPSGSQIGKKESIEDTARVLGRMFDGIEYRGFGQEIVEELAKYAGVPVWNGLTNEYHPTQMLADMLTIREHFGHLKGIKLVYMGDARYNMGNSLMIACAKLGMHFVACTSKNYFPNEELVETCKGYAKATGATITLTEDIGSGTKDADVICTDVWVSMGEPDEVWEERIRELSPYKVTKKVMENAGEQAIFLHCLPAFHDLKTKIGKQIHDKFGLDDMEVTDEVFESPQSKVFDEAENRMHTIKAVMVATLGEREMKSEILRLLKESDTYISGQQLCEQFQVSRTAIWKVIDQLKKEGYEIEAVRNKGYRLIDSPDVMSKAEIESLVDTKWAGKNVVYYDEIDSTNNRAKEAGDNGAAHGTLFVADMQVAGKGRRGRVWKSPSGSSIYMTILLYPDIPPVKAPQLTLLMAIAVAEGIQEVTGLETKIKWPNDIVVNGRKICGILTEMSTEIDYINHVVIGAGINVNQDTFSDDIKATASSLKLELGKSVKRSELIAAVMKSFEKCYEIFIETEDLSGLQELYNSMLVNRDQEVKVLEPGNEYKAHAIGINQTGELIVRTPDGKEKEIYAGEVSVRGVYGYVMYDEKVVLCGANSYEEKYYLNPDFEQLPDDVKNELKIMCVLYVHDVGGILTLVFEENGELCFEVTSDDFDPMFDDIGSQLKIKQLQRDKQDLLQALQLYYKVFFLGEEINSEEMLLVIDVGNTNITLGVFNKDELFGTFRMKTKQPRTSDEYGITLQELVERHGIESSKINAVILASVVPDVMHSLGSAIIKYFGVKPVVVSAGIKTGIRIVTENPRQVGPDRIVDAVGAYTLYGGPAIVVDFGTATTFDVIGPDGTFEAGVIAPGIRTSAQSLWGEADMLPAIEIRKPNSILAKETITAMQAGLVYGQIGQTEYIIKRMKEESGYPDAKVIATGGLGKMIANETDMIDVYDSQLTLKGLRFIYEKNKKSKMKIGNVNLANPYILAPMAGVTDLPFRLLCKEQGAGLLCMEMISAKALQYKNKNTKALLAIHPEEYPVSLQLFGSDPKIMSEMAKMIEELPFQILDINMGCPVPKVVRNGEGSALMKNPKLVHEIVSAVSKAIEKPVTVKIRKGFDDDHINAVEIAKIIEDAGGAAVAVHGRTREQYYSGKADWDIIRQVKEAVSIPVIGNGDVISGEKALQMRRETGCDGVMIGRGAQGNPWIFHELQEYERTGVVPPRPTPEKIKETMLRHARLQIEFKGDFIGIREMRKHVAWYTKGMKGSAKLRDAINQVESYEELVELLDKAIVMEAKKKLLTYAGLKALEDELENLKVVKRREIAQKIKEAREQGDLSENAEYDAAKDEQRDIEARIEELEAILKNAEVVVEDEVDFDKINIGCTVKVFDITFDEEMEFKLVGSTEANSLEGKISNESPVGQALMGKQIGDVVTVETQAGVMEYKVLDISRSLMAKQQNNGQEQDVNQLRKVRRDKLAELQQNGKDPFKITKFDQTHHSLEVKSLYEAHEAELLKDHHTPDVEGMDEEQAKEVLKKDYEERRSIMDANPIHVAIAGRMMFKRVMGKASFCNIQDLQGSIQVYVARDAIGTESYADFKRSDIGDIFGLEGFAFRTRTGEISIHAEKMTLLSKSLQILPEKFHGLTDTDTRYRQRYVDLIMNPESKETFIKRSQILKEIRNFLDGRGFMEVETPMLVSNAGGAAARPFETHYNALNEDVKLRISLELYLKRLIVGGLERVYEIGRVFRNEGVDTRHNPEFTLMELYQAYTDYEGMMELTESMFRYLAEKVCGSAMISYNGTVIDMAKPFERISMIDAVKKYAGVDFSEVKTDEEAKALADKHHVEYEERHKKGDILNLFFDEFCEEKMIQPTFVTDHPIEISPLTKKNPEDPNYVERFELYVYGREMCNAYSELNDPIDQRERFAAQEEAFAAGDEEANHTDEDFLNALEIGMPPTGGIGYGIDRLVMLLTDAQAIRDVLLFPTMKTLGGVKSENGVSSKEVSTPNSEPEKIDFSKVKIEPLFEEAVDFDTFSKSDFRAVKVKECVAVPKSKKLLQFTLDDGTGTDRTILSGIHAYYEPEELVGKTLIAITNLPPRAMMGIDSCGMLLSAIHEEEGEEKLHLLMVDDHIPAGAKLYMYMRLTQREKEMADMFEQMSKDEQEIMIEFAKRLRTEDPKELVKEINQRLDIDDEMSNSLAAVHPELIIEWSDRNLPLTPDSVTFGSNKKVWWKGACGHEWETSIKARSSGEKCPICSGARVIEGINDLNTLKPELASEWSEENEIKPTEVSIGSHKKVIWKCKLGHEWIATVKSRTINRTGCPYCSHNKVLAGFNDLATVLPEVAAEWSDKNEKKPNEVTAFANSKAWWKCNTCGYEWNTLISTRSGGSKCPCCSGYTFIKGKNDLKSTHPQIAKEWSEKNYPLQSDEVNAKSRKNVWWYCRKCGNEWKSVINARVKGTVCPVCAEREVLAGYNDLATTDRELLVEWDYELNKLKPTEVSRNSAKRAWWKCRYGHSWSMKINERTVLGKGCRMCEQKYMSLFPALAISYYSNLKGLKVELGSDRLFGIPLDVYIPLEQVAIQVNTDSEKIDILKEHLCKQRGIKLIKLPMKPNEAENVYAQRIKAAFQSVHIFISSDTQEDVRIIRKTFENWRSSRMREKKYHIYLTDDEQSRVIQSLINLKNNLIAQGRYTDAVDDVLMKVLSARKRKLKIKMISVFQNSENSGYEYQVAPDMAMTVRMIMILLYGAGGVPGRGMSNCKTISVCNQKGGVGKTTTTVNLGVGLAMQGKKVLLIDADPQGDLTTCLGWQDTDGLGITLATKLTDVINETMTDPMVGILHHEEGVDLVPANLELSAMEFNLMNAMSRETTLKNYLSQVKNRYDYVIIDCMPSLGMITLNALSAADSVIIPVQAQYLPAKGMTQLVQTISKVKKYINPDIKIDGMLLTLVDSRTNLAKSTVEALRANFGNQIRMYRTQIPIAVKAAETSSKGKSIYAYEPNSTVSKAYAEFTKEVLADGRKKERLHSHEARMAGRKSDFTLTKLDDLFTTQAQRDEEQLSKIRDIPLELIDDFPDHPFKVRDDEDMMQLVESVKERGVITPATVRQKEDGRYELVSGHRRKRACELAGFETLRSEIVDLNRDEATILMVESNFQRSEILPSEKAFAYKMRLEAMKRQAGRPAKNNSPVGNNLEFAKSSDELADKTGESKNQIYRYVRLTNLVPELLEFVDEGRIKMRPAVELSYLDEDCQRDVVDEIDLNDATPSHDQTIRMRKLFNEGNLTTEAIHAVMSEEKPNQKEKIVLRGDRVRQLIPKNIPVSQTEDFVCKALEHYNKFLRNRAERDSRMIKSKFKRVTSLFLATLMCVTTFAGIGSTTAYAASGEKADVYMVDFPRDGDANYDGVWGHSNLTLKNGWHTGRSNFTNLKAIGSYSGNVAYCIEPGISLKVGQTMNKYDENYFNNLAANGVISGDEIRLFVGRILQYGYRGTISTSWRSQNEAAANSIAQAYATQLLIWETVIGERDANFNHVAASGCSNVKDVINAKHPLRNKIFSYYNSMVQSVQNHATIPSFCNKSSGSAKTIELEWNGSKYTATLTDSNNVLSKYNFKASISGVSFSVNGNKLTVSMDTAPSKEFTITATKKNAVRRGKFQYKVSARTMQSAEGSFNTRYPHEPNGIKDPEYSIQCGVQELKAALTSAEAESPIDMEHIKLALQGYNFGNGYISWAKTKYGGYSYANAVEFSTQQAQRLGWDSYGDTQYPAHVLRYYPYGRAFTAGGNQAIVEVALTQLGNQGGQPYWSWYGFNSRVEWCACFVSWCADQCGYIESGLVPKFAGCVDGANWFKSNGKWQDRTYEPKVGDIIFFDWEGDGTTDHVGIVEKCENGTVYTVEGNSGDACKQRQYAVGSSNIYGYGIPAYMDEQKIIFSNRFEKEKFEDYKTDLGTDSSVTPDFTEADDFFKFIQKNRRSVPSKERIADKDKFIKTVYELSNSFEIDADLIEFAEGYIANIYVDYACYTGYIKKLLAILFILADDISFLDGSKENADMLFSFTYHTHHIFLNNRETTDFSMKLDTIGKNIRKFRLARKLRQEDLAEKTDLTTNYIGMVERGEKIPSLETFIKIVNALGVSSDMVLTDVLETGYTVKNSMLNEKLEKLAPEDRNRIYEVIDTLVKQSKQILPMRISYNKLQKLMIDNQMKRQDLMRAAEISSSVATKLNKNETVSLDVLMRICKVFHCDIGDICEVILDEMVEETYSAGLISQSFWFVEMKKVIKLIDDGKSEEEIKKMCIDENLFGAAKEYRAKRIYGYIWNRAKRLDKTLIDLFCTSDLATQKVINLIAILRSDRLFFEFMFEVYREKNILGIPVIEDADVNIFFKNKEIQSENIAAWTDGTKRRLRSIYFNYLTDANLLTAVEKKKTITPPILDIALERYLEACGESAMIKAITGVDMMSLDERLDKAEEMIQKPSFRENKGLGNEVGYYIFDYPAEKELYIRERIEYIKKKSENSDDDFKVVVFDLYDIMIDILIRKGYLEKCYQFEKTKGFERVSKSISNMLRITSSDSLIVNHIRDNTPEKAVVFITGIGKCYPILRSHTVLNNLHQVIDNVPVVLFYPGNYDGQELVLFGEIKDDNYYRAFKLVDMIIKNMFSKPIDRDIKGVIKVGQDDDANIKQELEEYVVTRELQKHFSDFFASYKRGITGNTDKMGVWISGFFGSGKSHFLKILSYLLENKEVGGKKAIDYFVDDNKISDQMVLADMKLAGTIPTDVVLFNIDSKSEVNGKQSKVAIVSVLQNVFNEMQGFSGSNPFLADLERKLTEEGKYNLFKEKFEDSFGSAWEESRSDFDFIQDDVVEVLDEIGFMSIEAGRNWCEKATGEYTYKVEDFAKLVKKYLDKKESNHHIVFLIDEIGQYIGDDSKLMLNLQTVTEDLGTACGGKAWIIVTSQQDIDSITKTKGNDFSKIQGRFDTRLSLSSANVDEVIKKRILEKNEAGKQTLTLLYDDKATVIKNLILFNDGVEKKLYSDRENFADIYPFIPYQFNLLGSVLTSIRTHGASGKHLAEGERSMLALFKESAVKVMNDEPGTIVPFNMFYDALEQFLDHSHKGVISRALDNEYLNPNHEKECFDVNVLKTLFMIKYVKEIKANIENITSLMVSNVNDDRMALAQQVEDALKRLVRQTLVQKNGDIYVFLTDEEQEINRAIESQNVDSGEVIAKVSEMIFDGLYDEKKYRYPAFNGRYAFAFNQVVDDKPYKANQNNDITLKILTPNSDERADETTMRILSGQSSCVLVVLPDDRTFLDEIRSALQIEKFIRFDATNAVTQFESIKEAKKVEMRERNGAAKLFLSESLKNAEIYVNGDKIQSGAKEIASKINDALGKLVSTVYHKLSYIDTAMSESDIRTLFKNNGQQLTLAGTNTAKNELALHDVNDYIALNTQRHMKTSMKSILERFLKAPYGFVEADVQWLVAKLFKDGEIAMFVNNDAVTLLSKTPEEIIRYLTRKEFNEKLMTEKRVKANEKQKKSVRTVMKELFNVTSASDDDDAIMRSFLGYALNLKNDLEKLDIHYATQPAYPGKQLIASGKKLMADVLQMKYSNEFFAGIDNKKDDFLDFAEDYEPVKKFFAGEQKGIFDKALKLMKIYDDSKTFIVNSEIEAVVADIKSILKKSVPYSEIFKLPELLDTFINLYSKLLNEMQKPIDNAIQEARQRVFEELQDKKCHDKLADKYVNLFREISDKAMSCNNVATLQNIKVEADALKVRCLNEIEKEEAKIIAAEQPAHVAETGNYGGETIAPATPAPKVKRKKTVSIKSINNATTWQLENEADVKKYIAELEKKLMNTLEEDTIINIEFMEEKVIELIKKDIARCEQQTVNEGSYQLYQALMGKYNGLFPGFSDDIPKSGKVSTGGAFNYRPELNAIKEVLELKLITEQSKDPLFEFKNMFSQDIDSLKRVIDIESDVSEEEKKRLYWSVTAKYHPYVPKLGEGLYSYFAEQGFYDEVEGSSLDYNLQQIYNKLCAFKALNYPGLDAVAMSSPNTVVNITNNNENKNTMNVTFDSVRKTIDSMTSLPEEDIEEIKNKISALEEIVNSKESKSKKWSKAKDIIKWVADKGVDVGIALLPLILKIGMNKTAIRKFAEWAREKLIEDIKYKAGTVGITANGIVEKLPQSTSDTYFYDVGTKDYTKISGIEIKQRDALVKAIQTKERSYKSYQEAFENVIEEVAYTWFNRLIAIRFMEVNDYLPSGVRVLSSENKAKKEPDLVTTPFDTDLEFTSYEQDRIIQLKDDNKLDELFRMLFIKQCNKLHDILPELFEKTDDYSELLLTISFTDPEGIIHHLINDIEDVDFRINDEMYTDDGKIKADGQVEIIGWLYQYYISKKHDEIVNIYKGTVKKADIPAATQLFTTDWVVRYMVDNSLGRYWIERNPQSKLAEKLEFFVTPKNGEIQFVDEKINPTDLTFFDPCMGSGHILVYAFDVLMEIYREVGYSDRDAALSIVENNLFGMDIDKRAYQLAYFAVMMKARSYNRRALTKGISNKLAVVEESNSIDKFACNGLTTDSEQNKIGEYLVEAYKDAQEIGTLQTIEKKDYKEFVEYLNNVESSAGQIDLFSTAWLNDTLPQMVQLAKQAEIMSNKYAVVCTNPPYMNKLEGQLKKFVVDNYKAYSGDLFSVFIYRNFDYCKIDGYSAFMTPFVWLFIKTYEALRTYIIDSKAITTLVQMEYSAFEEATVPICSFVLKNGKATEKALCFKLSDFKGGMAVQKQKVLEAIDNKGCGYFYEAVQSDFNKIPGTTIAYWISKNMLGAYEAGKNIGEIAFPKTGMTTGDNNRFLRMWFEVNINNAKFDVESAKEAQCSEKKWFPYCKGGGFRRWYGYNEYLVNWFNDGYEIKNNIKANGLKAASVRSENMYFKPLITWSAVTSGLFSCRYCFGGALFDSGGSSISVPQNAYYLLSVLNGKIGQYVLDISNATINYQPGDIAGIPIIFEKVEQVESNAQLNIQISKTDWDSFETSWDFKKNPLVSGAANKISTAFEMWSKECAERFNQLKANEEELNRIFIDIYGLQDELTPEVEDKDVTVRKADLQRDIKSLISYAVGCMFGRYSLDEDGLAYAGGEWDNSKYDTFIPDEDNCIPITDEEYFEDDIVGLFCAWLKKVYGEDTLEENLDFIANALGNKGKTSREVIRNYFLTDFIKDHIKTYQKRPIYWLFDSGKQNGFKALVYMHRWNADTIGNVRVEYLHRIQRVYEKEITRMQEIIDNSHDNKEISNATKRKEKLQKQIKETKDYDAKIAHLALSRIDIDLDDGVKVNYEKVQTADGKKMQILAKIMELEYGLVENALDSLREAMNYYNEGDEEDNANQYKFSILLSAHCVELLLKEILRRNHPALLFENIDSVKDLQDDDNQTVGYKNAIQRVKKLCGVDLKQYETYIDELGRVRNQIQHYKCSINGEYHKQLMAKTFSAIEFIFRDILGLKFEDYENIIEPADIDFLHEDIAANKARKKDIVKDFEKSENRFRIEYVDGKYLEVCCPHCGTESLALESNGKIKCKFCGEEFDNYSELHKADRNCITQYGILREFGRRRHLLHSRIFECPQCENDSMIMLPNRKWLCLVCGYEVETSCYCDECGDEMPYIDGICTTAISDTDTEDFKTLCPQCAKKYAEDEAYIGYELSMAGKDDNFKVLKKKEIYEFLEGNGPFLVTHNGTEYGLPYYTGTQLSSLCTEFGLTEVVGGSRWCYVEELLDYAIEQQRCDELFRFLFSEKQFTNLQDIADMNEVDDVYRQIVKKAIEHINHSIRLSRKELVLINGHFMIVEVGKTPVIETPKLNVRSIPYVQGLRERCNDDFNSGNYDSVITKSRTTMEEVLVQLLEENNVEQISKGDLLKLYNQVKTLFNMQQRNENDKRVNNMLSGLEKIVQSIAEMRNANSDAHGVGSRRIAIRECEARLVMNSAITFCEYMISVHDKMAELNLKQITDKLNSEFASDVRKLVFWYDANAEFQEDIDSIELENAKVLHLEPDNQFYIKYFLEREDTTTNYLVYAPFAKPNIRDNHLADTIRYSKEFFADRASLLTLDLGIDERYKPVIQHYIKFFANKDRTQKFYDLEIENFNRSTIEVALMSVLCKDKTASFEEVLRSILTDDGLQDNKYLSEFEKYDLLSAFWQQADVAFGYNDPKPTLEKLVITMFITYAAKSIHTDMPQAWKPFISYKFGNIIAFMDNLMNSYLYGTRFDKISEIIYNAINGKNYLEKMEVETLVDCNIFAGVDELLISWIIGRLENEDIGAKLNGKTIPELCVERRKQHFGKNFRNEYFILQNAFDMIAEGKYQPVSGIKNLVKEYTESTYKIDRYYRYFYFHFDKLEDTTQFEKIRELVENIYTNEYLNRITVNWNNELADADGETGLTLQRDFFARHINYSKDRVVVIISDALRYEVAYTLFEKMQADEKCNASIGAMQGVLPSYTPLGMASLLPHKTIEYSPSYDVLVDGKACSSTEQRESILKEYKVNSKCIQFDSMKTMKQAELRSIFTGQDVVYIYHNQIDARGDKAVSENEVFTACEEAIEEIYTLIKRIASQANTYHFIVTADHGFIYKRDKIQPTDKIAGAASKSNSVGQRYSTSAEEIKADGVCHTTVGKVLGNDDERIVSFPLASDIFKVAGAGQNYVHGGCSPQEMLVPMIDVKVDKGKKETSLAEIALVSLTSKITNLITTLDFVQTEPVSDVVKETSYRVYFISDNNEKISNENIVIADKKDKDTTKRMFRLRFNFKNKKYDKSQKYYLVAYDDKNDIEVLRHEIIMDIAFADDFGFFGMRRWGFSDALAFAVAMTVRDMSREKEKRLIKTQKFYQECYERIANDSEQAFNIVSKVVKKASRRYIPNEIASGSTYLALYAFALVIERQGRVTKEQSKIIRIYFNNMSFPFSESAYLSAARTGGEVGNFRNVISISKSYAGGFWVNFFRALYKSGTQKDLQDMIDYTTSIIMRFSILGNPDSNISNAICQNFIDSVNYQINQVREISIKEVDWLGVIPIEDRLEEMKFFYEDLIDRSNITNDISKEELLPYLELQILNCICDVVMMTKQPKSVKLRMMNDAVRLSGIHTGVTPEQYVREIANNTEIGQFYKTMFSSGNPLGSFWLVIFTMGGQLYGTDATDEPIGIVNNIFSILIQIENYLDEKYNFLGKDSIAKDYMLHIIEQLADKCNEEDMDNIEKDIAQGYADFADDEGSTAVGTEENIAAENSTSFSFEETSSFSEMSDINRKLRTYFDGKIVRKDLTKSIKEGANVPVYVLEFLLGQYCSSDDPSIIEEGVANVKRILADNYVRPDEAQKILSLLRQRGSHTVIDKITVNLNIKKDTYEAEFSNLGIKAIPISEDYPSKFDRLLCGGIWCIVQLEYEYIEEDKNASPIHIRKLTPIQMPHVDINELKQGRKAFTKDEWISVMLRSIGMEPDTLTEREKWLLLARMLPLVENNFNLCELGPRSTGKSHLYKEISPNSILVSGGQTTVANLFYNMARKTVGLVGLWDCVAFDEVAGINFKDKDGIQIMKDYMASGSFARGKEEKSASASMVFVGNINQSVDVLLKTSSLFAPFPPEMGTDTAFLDRMHCYIPGWEIPKFRPQHFTNDYGFISDYLAEFIRELRKEQYGDALDKYFRLGKNLNQRDTIAVRKMVGGFIKLLYPDGEYTKEELEEVLKISLEMRRRVKEQLKKLGGMEFYDVNFSYIDNETFEEFYVSVPEQGGGKLIPEGMCNPGQVYTVAQGKTGMLGVFRLESQMMPGNGKFERSGLGSDGKCKEATNTAFNFLKANSNRISGSISTTTKDYIINYQDLQGIGMTDKLALPTLIALASVALGKSVASSLAVLGEISIAGTLIKVDELANSLQVCLDSGAKKVLLPIVSAADIGAVPSDLIGCFNLIFYSSAEDAVYKALGVEMETKPRILYLQKILLERTDEENPLSTTQLINILNDEYGISAHRTTVTKDIAALQEFGMDIVTIHSTQSKYFVASRKFELPELKLLIDAVESSKFITSKKSDALIEKIHTMTSAGQVAKLRRNNYVVNRIKPDNEQIYYIIDTINEAINAGKQISFQYYDYTGLKKKVLKNKGEVYKLSPYKLLWCGDYYYALGYSEKKSKVINFRVDRIASKPEILDKDIVPMPDDFDIENYTKEVFFMFSGEKVRVDLRCDNSLMKTMVDRFGEDVTTLAYDMTSFRVQTEVSASTTFFGWVFGFNGKVQILAPESVKEQYRQMIAKADEDMQESEMLTPSNQYLQAVEEINDYVNQAKCRASVSVNSEIMKTNIFIGNVIIRNSEWGNKFVENLSKDMKMRFPSAKGYSVRNLKYMKKFAQTFTEDDVDEYGLGRITWSHHQILMSKVSNREEYIWYLEKTLEHKWSVDDLTSQVKSQLYERQAVANKISNFERRLPAEQKDMVLSTMKDPYMFDFIDYTEEMLETDIENELVKNVTSLLMELGTGFAFMGQQYHLEVGGKDFYIDLLFYNTKLRCYVAIDLKTGEFKPEQAGKMNFYLSALDDLVKAPEDNPSVGLILCRDENRTIAEYALRDMSKPIGVSEYHLCTDLPLDLKDALPAVEDIRSRIDMKKMRSKSPELMNEIKKYIEDYYLQNRQSPSTTKIAEAVGIARGTAYKYLVEMAEKNMIEYDGQEISTNVTRKYSGEQTQTPIVGSIPCGSPQYEEENIEEYVSLPTAIFGKGDFFILRASGQSMIEAGIDDGDLVVVKRQVEANEGDIVVALVDNQNTLKRYFRDDENKKIILHPENKKMKDIIVDECCIQGVACHIIKELMRTLEGIRYLINLDSAEIQQNFAGGVAPPDKVESEVDTTMSIYMSRAELEEISEGLITAYANKFSNRVIQSIDIEHFITEFLMLRIEYASFAEDDAGRIGFLADGATPLLIHQDGKIIPFVFPKDTIVLDKFLLAEKEQGRRRFTMAHEASHHILSKMYAMPSEGRFHAEYDSERSYSKEELAQMFASVEWQADTMGASLLMPRRIIENALAKYNQSNPIRVYGDNTITSKDKAVIRRMAAYIGVSYTALVIRLRDMGLFEYHNILEYISNELNLGGVSQMRLQTQVAPEIQKRLLLSRVEAESLKERDILCPTCGFRIQRVFSDATGHLSVKCQKCKNVHILNLAYFRRIRRNGYGRNCRRMTNKLTLTEQEELFAKDCKLINLKYEYNGYTGDEKWAIITELSVKELWEKYPLVIERYSPFVHLSIAQGEVIDDANRNEDKYAKRSSRTLDCYGYDDEMSSQFHKELAIMFDDPFERAEEERLELEREELRQCEIRKARIALSMLQPLQRERLMKNVCCGLSSRVIAKQEGVYYSSVDKSIAAAKKNFIKFYENLMKEKMICRGDLFYYDFGDNSGSVQSGERPVLVVQADDYNQNAPTIIVAAVTSVIKKRYLPSHIILGEEFGLKKPSMVLLEQIRTVNREDLREYIGTVDDDKLFRQINATLKKTFGLWVYKPEGKENIRCLCPKCLNDYIHNPDYIVRRLDPFAKRKDRCDKCDGDGWDYVVTDRYSSKKEKRGSNDRKMTENKIIIPIWKKSNLTVEEAAAYCGIGPRKLREMSDSEFCPFVLWNGSKRLIKRRKLDEYLDNAYSIMADTEKIIRKKYDVPIWHKSNLTIDEAVEYSGIGRERLRKLTSQEECPFVLHIGNRRMIKRRIFDEYIEKLTFLEMNTLKNLLSLNDDERLLAEVRTYQEKLISNAEEPIWERKWLTIEEAAAYSGIGRTKLRELSNQAGCPFAIWIGNKIHIVRERLDKYIDKQFRIMATKRKDKSRVVLKTGEVQRKDGTYQFSWQDSQMKRRFVYARTLDDLREKEKRIQKDKCDGIKTEARYTTIDELFDLWANMKRGLKNNTFENYKYMYNTFVRPVIGSKRISTLKKSDIKKYYNYLVDERNLKPSTIDNIHTVLHQVLQIAVDDDFIRNNPSDNVLRELKKAHCFQSEKRRALTKPEQELFLNFLKTHPVYEHWYPVFAVMIGTGLRVGEVTGLRWCDIDMESGMIDVNHTLVYYDHRTEGSKSGCYFNVNTTKTPASMRQVPMLGFVKEAFEHEKQKQEDLGLHCEVTIDGYTDFIFINRFGQAQHQATLNKAIRRIIRDCNDEQFLHSDEPDVLLPHFSCHSLRHTFTTRMCEAGVNIKVIQDALGHSDISTTLNIYADVTKEMKAEEFKGLDSYFKVMKYGEFNSINTSLVEYERTTKRVPTMKSLDADKKTAKAETKAVETAPEKEEVIDFSKVKVEPLFEEFVDFDTFSKSDFRAVKVKECIAVPKSKKLLQFTLDDGTGTDRTILSGIHAFYEPEELVGKTLIAITNLPPRAMMGIESCGMLLSAIHEEEGEEKLHLLMVDNHIPAGAKLYMDIMNGSYAQTHFPCKLWDAGEKGLTLSAFEWEKDRKTLIYGQVDYMYGKALYKPEMKEGNPIRLYSLDEITEIFCKLGLRICNSFADFSGKPSSDNDIQLMVYSIREMEMMLQTQNLCKYFRKQKAVNNVSLNIEKGQIYGLLGPNGAGKSTTLKMLTGMMKPTAGKIYFDGKLLDRKDLSKIGALIENPPIYENLSARENLKVRQLLLGTDENRIDEVLQIVSLTNTGKKKAGQFSLGMKQRLGIAMALLGEPELLILDEPTNGLDPIGIEELRELIRSFPEQGITVILSSHILSEVQLLADKVGIISGGILGYEGALKQGDNLEDLFMNVVRKNQKAGEIHGMVNIIKAEHQKAKRTMRKKFIWGFPLLTFVMAFIFTLGMTNAYAESVWNWWYTLLLPGMIALFCYLSVAQEKKIKYYHLMTIPTDRRKLLLGKIIYIGYMILFSNVIVFAGATLGGFLLTTHVPVGGALIAVLFLTVSELWEIPVALFLSERFGMIVNLFVCLFITVSGVVISQTRIWYVLVSAIPMRMMCPLLHVLPNGLAAEAGNPLLDMGVIVPGMCLSIIWFVFVTVLFLKWFERREVKMIGRSLNADLRKMKGTSVILAHLLIPIITSVIFLIYYFFSPWNENMKVIAFYQAIGAGLPVLIGIFTASVMEQEQNAGDFQNLLSLPDKLTAFLSKLLMLLVLCLCSILLTAIIFGIGFGRIASSDIEIMKGCIFAALLLWGSSVPLYLWQLILAFQFGKGVSIGAGIISGLISALMLTGLGDYVWKYVFVCWTGRVPYTYLQSVLGETSVGEWLSFIPGCLIFTGISMVYYFWWVNHWEGNRISEMAKILAVDDEPAILEMIESILNKDGHLVTKVSNPLKINMEELHRYDLILLDIMMPGIDGFELCKRIRILVDCPILFLTAKTEENSLVNGLSLGADDYISKPFGVMELRARINAHLRREHREHSVRMVLGRVCIQISQKKLLVDDKELPLTKAEYEICEFLAKNRGQVFSKEQILEAVFGFDNESNDSTIITHIKNIRAKFADYDYTPIKTVWGIGYKWEEMGRVKRSNALSRIFMRYVLVMLGSLVGLVIVAYLLLYLLISVGCIYPANYAEQKINEAYDTILRADKVTAEMIPALCDYVIFSENGEKIGGDLSEQYEQIAWNVAKYGNASGKYFYKVIVRENEYVVLQYRLTPQYHSAFLREHFIGPQNVMIIMSVIGAVAIIIIPSIRFGKRIKKQMQPVLDAIGQIKDQNLEYETSCSGIKEFDDCLSAIDDMRDALRESLEKQWKTEQEKKQQMSALAHDIKTPLTIVRGNAELLSETELTTEQKKNITYVLNGTTQIQSYVKQLIDVTKSWNCSDVTYTTVRLEDFFADIKEHALGLVEIYHQKIDWKAEQSDKKVTIAYDPMFRAVMNVIQNAVEHTKENGIIYIDAKEQDDRLTFIVEDSGSGFTKEALLHGTEQFFMDDTSRNGEAHYGMGLFFAKTVAEKYGGGIKLSNSENTGGARVEIFFLSSQETSMKAHKYWSIGALITMIGTFYTGYKGSKSGHRYFACSTLICMIMSMYTGHKMISGNKRTRKQVENTKAEEMLELGIKAPDFELPDQNGEVHKLSDYLGKKIILYFYPKDNTPGCTKQACGFSERYPQFTEKGAVILGVSKDSVASHKRFEEKYGLAFTLLADPERKVIEAYDVWKEKKNYGKVSMGVVRTTYLIDEQGIIIKANDKVKAADDPENMLEELAMKIILSPAKKMIVDTDNLAPVELPVYIDKTAEVLNWMKSKSKEELKAIWKCNDKIAEQNFNRLENMDLYNRLTPAVLAYEGIAFQYMAPSVFEIQQFEYLQNHLRILSAFYGILKPMDGVTPYRLEMQAKVGIGDAKNLYEYWGELLYRSVIDDSRIIINLASKEYSKCIEKYLTPQDRYITIVFCELSGDKLVTKGTYAKMARGEMVRFIAENNIENPVEIQKFDRLGYSFRSDLSSDSEYVFERKIKMLSLASFIIMRRHVAANEVYEFIKEAYPTIGKGTVYRNLDILVEEGALRKVEVPDGPNRFDFTLKNHYHVRCIKCGEIFDVDMDQIPDLLERIHNTHGIEFVDYDISFKGICPKCREKVKEEQHGMDRKAMYKLSYGLFILTAKEAEKDNGCIINTAIQAASEPNQLSICVNKANYTHDMIQRTGKFTVSVLSQKAQFELFKHFGFQSGRDTNKFEAFEQCARGTNGIYYITEGTNAYISVTVTKTEDLGSHTMFIGEITDMEVLSNVPSVTYDYYQNNIKPKPQEVGKTEDSQTIWRCRICGYEYVGEELPDDFICPLCKHPASDFEKVVKKTEVKEMAANKYVGTQTEKNLQEAFAGESQARNKYTYFASVAKKEGYEQMSALFLKTADNEKEHAKMWFKELAGIGDTKENLAAAAEGENYEWTDMYDGFAKTAEEEGFPELAAKFRAVGEIEKHHEERYRALLKNIETAQVFEKSEVKVWECRNCGHIVVGTKAPEVCPVCNHPQSYFEVRAENYMPELKAGVTDAAVEKHVPVYTLDGNLVHVVGEIKHPMLEEYFIEWITLNTNQGVYRKQLNPGQEPVADFCLCDGEQVEEVYAYCNLHGLWKCMANYTKTTIGKENRIELHEKLSLTGAEISLNELPAGANVPFVHSHKENEEIYGILSGNGKAIIDGEEISLSTGDWLKIAPAAKRQFFASDISGITYICIQVKENSLEHFTAEDAVIGMRAKEELPECPVATAVSLIGGKWKLLILRNLKERPWRFNELQRSIDGISQKVLTDSLRQMMSDGLAYRHDYHEQPPRVEYGLTELGTKMLPIVNSLADFGNYYKSIIEQNMEMNGGFLVTKIKQLGDRIFEKILSEKNIDAFNGAQGRILYVLWQEDGISIRSLSTKCGLAITSLTTMLERMENQGLISRVQSETDKRKTLLFLTEKAHALKGEYDSVSDEMGSIYYKGFSEEEITRFEECLDRIRKNLEEWQKSMSICIKDQIQNMNIVIGCTVGCTYCYARNNVKRWHMIDDFADPEFFPGKLKMMEKKRPQNFLLTGMSDLFGWKPEWREEVFAKIRENPQHQFLFLTKRPDLLDFDIDLENAWFGVTVTRKAELWRIDALRKNVRAKHYHVTFEPLFDDPGTVDLSGINWIVVGTMTGAQSRKIHTEPEWAWSLTDQAHKFGIPVFMKEDLVPIIGDENMIQEMPEEFNKVLEVQKSWKKMEEVINGILIREVETKNIMTKSSLPVGGYSVNPYVGCTHACKYCYASFMKRFTGHKEEWGTFLDVKHWPEIKNPKKYAGQRVVIGSVTDGYNPQEEQFGNTRKLLEQLIGSDADILICTKSDLVVRDIDLLKKLGRVTVSWSINTLDENFKNDMDSASSIEHRIAAMKQVYEAGIRTVCFVSPVFPGITDFEAIFERVKDQCDLFWLENLNLRGGFKKTIMDYIAGKYPDLAPLYDEIYNKHNRSYFEALEVKAEKMAKKYDCAFVDNEMPYGRVPQGHPVIVDYFYHEEIRGTENTGKRNRMKYSTKLSDTIHILIFIALGDDEQLSSTKIAESIKTNPAYVRQLMATLKNAGIVVNTQGHANAALAKSADKINMYDIYRAVEGDKPLLHLDTDTNPDCGIGINIQFAIGDFYHEIQNMVDEKMKSITLQDIIDRYYFKIRKVKNLMQKEEQVSFLAEKIRQADAVLIGGGSGLSSAAGYNHYHWLPYMEECLQDFKEWYGLKSPFDGFYYCYSSPEQQWAYYARYIQSMWDAPTGQPYYDLRDIVAEKEVFVLTTNIDMQFERIFKKERICDYQGNSGYVQCSQPCHDQIYSNVEMIRRMNENIRELRVTSELLPRCNECGRIMVPWVRDDTFLEGKDWREGVRRYENFLKKYLMNGTDKNVVLLELGVGEMTPSIIKLSFWKMTYKNEKVFYACLNQKKSSVPEHIKDKGIYIAGDLAETLRDLKENIAGKEMMKMNVYQEISQIIKEADGILIGASNGLSIAEGYNIFADDAWFQENMGDFREKYGLRCVLHGFSVPMKVEEKWAFVSRLVKAKAMQDEPSEIMKNIYALVKDKEYFVVTSNAEDHFVPAGFEADRVFEMEGKLTQMRCKNRCHDEVYPNQKAVLAMTEEEVNGRVPKELLPKCPKCGGDMEVNWGEMSSFTETKNWKEKAARYQEFIQNLHGKKLVILEFGIGWRNQMIKAPLMQLAAVEPQARYITFNKGEIYIPEEIKEKAIGVDGNLTVALKEIRKGRIDMSCYENLVMKTQMNYSRHYSTYASGGTAVVLSKQKPLPYEEQIQEFVRRVQEAECIIVGGASGLSAAGGGDFYYSDTPSFREHFGKFADKYGFKGAFSGMMHRFSTRNEHWGYVATFLNTTQNAPIREPYLDLDRILQGKEFHILTTNQDTQFVKIYLEEKVSEIQGDHRFFQCSQCCQDETWDAVQPVADMIAAMGEGTIVPDELIPRCPHCGAEMFPWVRGYGNFLQGKKYEEEYEKISKYIQKNKDRKILLIELGVGRMTPMFIQEPFWELTNSLKDAYYISVNSEYQFLPEFIEDKGIAILGDIGTVLKDLRKAKEESAFVCMLSLLFAICMIWFIGKFFIFGVKASWGILKLLCTVVFFPVILIGMVVGGLIYIAFPLLIIGGIIALISSNSMGYDIEKEKREAIEAGQRALSSLRTAKENLNSAKNWGLVDMFGGGFFSTMFKHSKMDQARQNMEQAKYDLRNFSRELNDVNMACNLNINTGDFLSFADYFFDGFVVDWMVQDRINNARHQVEEAIRRTEYIINQLQHMMGKQSTRENKTIYQICREEAGLTRSEASEKMTAVSDSKIEKFEYEMQEPTPYDIIQMADAYGRPDLCNYYCSHKCEIGHRYVPEVEVSDLSNIILETIASLNEINPLTTRLIQIARDGKISDDEIKDFAFISNKLDEISLAIDSLNLWVDKTAGEQGLNIELLREEKKKQKMKKILSIILITACLACGCSSASGTGKNTSKSTAREPESIDFFAMDTTIKFSAYGDKKVLKGAKKVLTDLEKKVSVTDSGSEIYHINQNGSGTLTGDVSDLMQKALQMCTQTDGALDISIYPIVKAWGFTTGDYQVPDESTIQSLLPMVDYTKVEFDKTTGNVTIPSGMTIDLGSIAKGYAGQQSAQYLRDNGVKSALLNLGGNVQTIGSKPDGSPWKVGIKDPNGDTPMMVLSITDQAVITSGGYERYFEQDGHTYWHIMDPATGHPADSGLCSVTIVGDDGGTCDALSTSLFVMGLEKAADFWGKSNDFEAVFVTDSGEVYITEGLKDKFALTDDHADTTVKVISRMKKNVKKVISFILSMLVIISTAVTPAMAAGTKEAPTEVKSVTASGLWTTVLNLEFEDTTWMDNINKVIVNDKECKKSTINSFSSDTNIWEVGSATGAYGSYKALKLAVSDGKLWTVKVSADGYKDLTVKITKETVNYTDTYKAEVVSNSGETTNKRYTADVTPAVNGKITLSAAKDIKEGDTVTVTATPDENYEVVAVTVKGVSGKSVDVQNAEGIYTFKMPAENVIVSATFKEKAIAGNKKIEVSQVSINKDLWGSDWEFTFKNAEDYVSAITDVKVNGTSWEEKSYSVSSGGQYYKNTSSNKLVCAAREYSANPTIPVLKSGDIITITANGYEDLTFKLVIKDGNASLVEDDGQGDPYDLHVKIDGSFEAAIVGQKNYDGVSSASVGGSSSNKNSSVKVYGALVNKGTEPADNDWEELDNLSKIKLDGSKCKVDIVPDTANGTPADSDSGMKGVYMTISSNLTLNGTPKDAGTYLVSVSITDDQGRTAVSNTLPFRVYSGDETLAERLKEENFKKYDSGLYAWDIMEPWAISKFGTNVEGEEESVRVPAGLEAWFGSKESGTYGYLGYDLPWKKVMSGDIPQTLYIPNGCNLTLTNMEILSSVRIVVENGGKLTLSDSVVQGIIDVQSGGTFSMNYDAYKNAFTTGSSICGQLRLADGAILENAAIYSHANYLANGDLTDRNTSEPVVTATGNVTIKGQVFIKGAEDGDGIGQTALRVDGTLRLADGAILVTTGGEGMINENDGGTAIDIKSGKITGNGKLVAIGGKTFWGNGGNAVTGNGTIETASAFLQGATASKAKNKEAGKAIGDSIRVITSDRYIKDGEVSDNYGTDDALSGLYWREGIDATPPLDKYVTSEVENILSLEGTLDKIYDGKAVNGPVVKAGDKVLAEGTDYTLTYKDSEGNELSETPVNVGTYTVTVNGLGTYAGMNLNVTFTISPKAAELTVVADPSSAKYDGKSKTPEVTVKDGDKVLKEGTDYTLSYVYGEDAETKDFAGAEFVKEGNYTITVTGIGNYEGSTGKAVFTISKNNSASTDPTNPSNPNGDKNVTDKKVSNNTNNVKPVVKNVAAKNNKNVPKTGDNANVLLWIALAVISCGVLAGAGVAVRKRKMSYKNNSKVYHEADIRNDYRKLTKLLIEKNLTITTMESATSGQIASLITDTEGSSAVLKGAFVTYCNEAKIMQGVPAEVLDTYTVYSKETAEAMARACAEAYNADIGIGVTGTMGNIDSSNPDASVPGQVYFAIGVKGEIQSYYIELEPQPTRLAYKLAVAKEIYDELMKRISMTHEDYERAANHWKIKDASDEKMDRDTLLKEIEQYIKSNNTCALATGSGEFVRVTPIEYTYHDGAFWMFSEGGEKFKALEKNKNVCLAIYDKYEGFGKLKGMQVTGTAEVVDYFSEEYIAAAVYKKIPIEALRKLPEPMNLIKVAPSKIEFLSSEFKKYGCASRQRVDVFRERMTTEELYDKLKLIQKMKCETQNLELKSAEQGCPKRLYDSLSSFSNQDDGGIIVFGIDEKQDYKEVGVYDAQDIQKKINEQCLQMNPVVRPLITVVEKENKKFVSAEIPGIDMADRPCYYQGRGRLKGSYTRIGDSDEPMTEYEIYSYEAYRRKYQDDIREVPRVTLMSLDQEELNRYVELLKRGKQRLATLDNESIYELMSIKRGEKVTLSATLLFSPYPQAYFPQLCITAIVIPGRTIGSLGDMGERFSDNQRIEGTIPEMLDEALLFVKRNMRTKTIISPTTGRRTDRTDYPITAVREAIINALVHRDYSIHTEGMPIQLIMFEDRIEIHNPGGLYGRITIDQLGKIQPDTRNPVLASALETLGIMKTIRVVAAVIKAVKEDGRTMIFATQRGYGEFKGGWEFPGGKIEAGETPQEALKREIMEELDTEVAVGEWIETVEYDYPGFHLSMDCFWCEIVKGDLVLKEHEAARWLTREELTDVEWLPADVAVAEKIEEEMDMPEINQVIMLRPTESPIVFIQQLGRGLRKAENKEYVVVLDFIGNYRNNFMIPIALSGDRSYNKDNIRRYVTEGGRVIPGASTIHFDEISRKRIFQVIDNANFSDIKLIRENYTNLKNKLGHIPALADFDKYGEMDVLRIFDNNSLGSYYKFLVKYEKEYTIRLSEDEEKAIEFISKKLASGKRIHELELLKRTLQYHHGIIGHLQKHLSEKYHSEMDEYCTENVINMMTNEFPTSAAKKIYAQCVFLKKEQDDYGISDVYEKMLQDPEFCAILEELVDFGISRYKVNYSYHYQDTNLVLYQKYTYEDACRLLNWERNEVPLNIGGYKYDKKTKTFPIFINYDKQDNISDTTKYEDHFVAENRLIAISKSGRSMDSEDVQNFLNATERGIDVQLFVRKNKDDKISKEFYYLGRVIATGNAKQFVMPNTDKTAVEIEWELETPVREDIYQYIVNEMQIAEESDSAKAYVNRMIKGKDGVVNKDFVQEKNPKMPWTTSFPMNNIDIFSVFGKIVLALGGAGAIIVAVSGFIARLWAKWFMEKQKNKYQKEIEGYKNELAVELAKCRTLNEKILHKEIFIYDEEFKIYKEIMPGFRKASKSVLDYLVIIKLLVEKGIEDTTEGKEKIQKAYASAYEMTFAYYDLVMDEGIFIEEQTYVMLMNFFAHCEKILRINLNPENWKDMKWDEIIDNQINEENKITCHLRNKIRSCMAKNSISKISNAFSTGGGGVNFEQQIQAMFLLSLLIDGFCPAMNEQTKKVHFQAKHLGHDVDDLVVITYRNQSEGKMACQIKHSITATEKDKTFQEVICAAWNDFNKEDFDRDRDRIALVTAQISNKAQQSLRFLHVEAIGAIDAEAFMERIDVPVFSNNDNQKMLVAIKECISLAKGCEPTNEEVWKFCKAFILLLFDMDCAESVNRALSASLIKCNSPENPILVWSRLVEYAGQCNQAAASVSKENIDRNIRDLFSKNNIIQLPPDPITAIDLFIPTIALIGAWKEDNEFDRKMIEQISGMEYSEFEAKARTMLSQNSEYLQLMNGNWKVCHKEELLNQCKNKLFDDSIGKLLEAVESILRQKSKCVASKMPYFIPVSGEYDNSLELRGNLVKSLCWVKKNLSELSQCNQEKIENNIYTLVSTLLQDAKWITWTSLRDCLQNLAELSPEAFLKEAERGIINNPTEIVNLFPPKSGELSGINYISNLLWALEILAWSPEYLVHSISVLGLLEALPYERTNWTNTPINSIVSILLPWYPQTMADLEKRKNALKCLKTDNPCVFWSTLKKLLPNKTRSTSGNPRPKYLKLEIPEEVKVTNAEAHECYVYLVELAVDTARNENEKLVELIDQLGYMYEPTLTDYLECLENSFEFGTDENTFEVWLKLRECMARIEPTEGKVIYKQLDRIQQLIEKMEPTDIRVKHRECYLGNRCLFDKGNYANRWKMLEDKKLSVVKEIFDEYGSEEVERFGCAVKNVHDVANKLGRFLRPNEMSSIIEKYFIGILSKEFTINCLISFVYTQGAEKLLETSLCQMEDEFMLEILSKIPFSLQLLDVINQVLDDDTAYWEKGAMPYSCYDAEELKIIVEKLVACKRYVTAVNIIGHSECEAVINAECIYKLMKLAGTEESIGVETLDDYAVQKIIGWFQQQEDIDLELRSDIEFIYLPMLDEYSEVRPRALNTRLSLEPEYFCSLIELFYKERNGEKREIELNKSLSDRLYEILFQFKVIPGIDWNGNFDAKRFDYWMKTVKTWSRDNDRYEVAMHTVGSGLSYAELDEDKLPQTAIIEELNRVENEELRRGYYLGIINQRGVHWIDPEGKPELELAEDYENKANIAESRGYSRYAGILRGVADEFKREAKSNILEAKNGDDEMFDALTYQEMLKEIKKNSEKYGITDDVVAILITRPDLASGKDILNSLEYYHFRTGHSINFYLPGYGAYWTEEEYPDGKVVTEIAGVKWSFSNQRFVEFIEDMEKYSKWRYSGESDLIFAEVKNGRLSYERAMEFHLDNMLRDKAIISVNQFFEKIVRIGQEGRSMNQIGNKLGIDKGKQVVFDALLEKMPMYMGDVIKQEKYFCVKNIQKMDNLTAKQRRKNMQHIKNKDTLIELKLRKKLWNKGYRYRKNVNKLPGKPDIVLSKYKIAIFCDSEFFHGKDWDALKSRLEKSNNSEYWIKKISRNRQRDDEINKRLSFMGWTVVRFWGKEILTNSDECVSVIEDIIWSQKTNLDGSEMIDKEELLMKYYLKRLGHQELGSVKNGKAQRGRYIYISKDKNVLDIFPPLSKTVTNDSSIIPIIPLYQKVAKKIYCNYIYHNDKYNVSGGTRNEYRIYCNGALEGKQLLFQPDDILIFRAEKTSSLPKDILGSNDVPEAAVEEANVFFLYRCCDKNSELYRMCKKLVDESNIRGNGHAIYQGIITEVENKINQLCVNNFNEMDTVIEDTVTAKAQSGDIDEMASLFNSVSFRDFVMTGYKQKCAITGNVIQYKSFMNLEAAHIWPRSHKGLYLPSNGIALCRDMHWAFDKGMFTIGDDFKVIVHPDVESDYLQQYNNKSLYIPENAFFRPDINNLHYHQTHIYGLFKTSGSLVKATGYYKNINMAAEDKTPYGSNMLNTIDLFVGCGGLSEGFEQSRKYKMIGAVEWEPSPVKELRNHLKNRWGIQDSEERVLQFDIQRTEELFNGWKDKKFGESKGLDALVGNRQLDVIIGGPPCQAYSVAGRIRDEHGMREDYRNYLFESYLKVVQHYKPRVFVFENVPGILSAKPGDGSVRIIDLIQKAFADAGYAVLPDLSNAIIDMTEYGVPQNRKRIIILGVSKEHYGDKAEAMVEKFYSSYLPEYKIEKKATVRDAIGDLPKLRPLDEPISYLGRKLSHSVSDPLINGHISRFHNKRDIELFKFLEEDIASGRMKYTSAKSLKTLYTKLTGKTSNVHKYYVLRWDEPSNLIPAHLFKDGLRHIHPDPEQARTITVREAARLQTFPDDYYFNCSQTDAFKMIGNAVPPLFAKKVAYAIYHLIQENMKKFNAIDLFCGAGGLSLGFQQAGFNIIVGVDNEQAALDTFEFNHKGAIGLNADLSKRETFDLILKTAGDRKIDVVIAGPPCQGFSLTGPRNFDDPRNKLYLAVIEMVKQYNPKGFIIENVPGMANMYKGQVKDEVLKRFRKMGYNIDCRILKACDYGVPQMRKRLVFMGVRKDIGNPHFPDPTFGPETKKPYRTCRDAISDLPTRTNNLGKNEDEYVKPAETEYQVLMRDGCSILYNHIATNHKQFVKDTIALVPEGGNYKDLPEGVGNSRNFHMAWTRLDGNAPARTVDTGHRNLFHYELNRVPTVRESARIQSFPDNFVFKGSRTKQERQVGNAVPPLLGQALAEELLKIIERSKTNAMNRSYNKLWKLMIDKKMNKTQLREAAKITSNAMAKLGKDESVPVETLEKVCRVLDCTIDDIMDINQNSKEMIIIELDIYTGVLEYKGINFSFVFDKQELRLIPPKDKKKEIEHEWFMHKIGEGVYAGGDHPQMERPFLVGVCNEDGNKMVFITQEGTYIGRYNSVLRIEVIAFFVLKYGECSINKMCFSSPEINCIHSIGQSFCFEYDEDFIEKGIVQLRTNEFSAVTTEAETFEYNSKIVKVTFGASRTFSSGVTETPLKLNSSLCFEFDSTEDYAFIYHLWVIAKRFIQYLCYRKNVFFSKVELSTSYKGYKHIKSGELYVLEDLEEHNSEEEVLKKGCYIRQSYITGAVGSILQSIAEDSIYLRHLPQNYEEGHHIDAARFVMITAAFEWEFRRIFPEGIKKKEKKIKAEETVVQLLTPLIENNTGEIKSILKYLKKCVGNDPLSSKLTFVGMELGNIIDIFGKHLYALNGKKLKYSEMGERLAAQRNNFAHGNLDKDFDELALLDLIYLELILYAMQLKFYGVEDVKIKKAINDLFHKNIRIDEMADEIKKNNKHLINAPAGSGKTTYIRNQLKSICINKPESRILCITYTNRAADELKKDLENANITVSTIHSYINDLISPFYSHKEVLDLYCEIYAEKINERIANVTNDEHIKQSNQYYTEKYGKLTEKAVRENLLEISYGETPFTSLYTGKLSHDDLLMFASKLIKRYPVLLKKIGDKYNYIFIDEYQDTSSYVLDIFYDAVKNRENVQIYLFGDRMQQIYRNYDGSFEGKLKEFDTSDRLEVNFRSIGKIVSILNNIYNDSSFEQQPTESNANVVPDIEPHVIISSNVPESIYKLQNKFPKILVLYLMNKEKYEEIGAKNLYDAYRGMEAYTFGRKYSPTDILSDMSNDNPDILMKFLFLLNNVIGLYIDKNYGMVISICKKENKYFDSSQFKIKKHADKKSIKNKFDKIIEIYEKDGCLIREVIESLFDNGFIPEKVKNDFEENIEYQKVLDIEMKEVSNLANYLSMPHISTQHGVKGESHTSVIFVASDNGNTPNVRMYPFFELWSELEFSLPQFEELFYSYKKIIEEVEKELGMKVSKLTAETHNKNEKNKTILSKYSKQVLEKYQGNLLFEALCKEDFIAYLKKPNVKNVQKIFKITEIEGILTAYKLFYVGCSRARKNLIIIVEKNKIMNFKEKFVDKAKKIGFTVLSMILKKIKIMNYRQLQSVELDMQDSLTVLAGPNNSGKTTLISVLKGMFCDKKLGFSYSDIPISLSSMWLDKTVPVFQKIMLEYDKEKGVQKIIDEMTDNNKFSNDYTMDNFQAQIQVDYDPDNDNIQYFADYLMDLDDTKHSFYFIYTYEPSITAFEKGLNERYDRMAARVRDIANPGCIEKETKFYFLKEELLRIYCNAVIEKCYFCNSNYKNENLMEVAAFKSLFNFQNIPAMRELDDNESDSSKGISKRVIALLKDNDTWVEATKKLPDLLMADIEDSGAKKEIKNSSIKSLDDTIRDISKTSGGHIGKLQLEMDVKEQDVEEFIRRITRAKYDVEGLLLNEESQGLGFSNLIYLHMRLEEFYKSIDKNKVNVFFIEEPESHMHPQMQNVFVRFLKNYYIDKKLQGLITTHSNEIARVVGLDSLRVIRQTEKSKSELFDLSKFRTSIKEKKIENLDDESEFLLTNFFDWFFEIGYSELIFADKAILYEGDSERLYIRKLIKLPEFSTLNDSYIAYIQVGGAYAHNYLPMLRMLKMKTLIITDLDYDKEILSMDKVKAEDSKSTNATINHCYRLVYPNKEENYFPTIKELYDFQVKEENILCDGRVYLAFQDEDSTARTLEEAMLKKILGFNVFHMIKRSEWKKIRKDKNLIFSIPNNKKGEKDSEYSIRKIVEATSNNKTDFMYSVILSENEEKMLPDYIKKGLLWLMKMSRITKEEIEKTKCGRFLLSDENIYLSIYSLNSYVFEYNLLNTEDRILYHRLQDKFDARLINGVITRVREQIIELFDKDKYIEAKVYFKPKKLSENGELEFRPLHSTGLITQIAIVSMLHLFVYEIPEEEEGDPKLRLSNLSRLIPSDFYGNRVSVKPEYLFKPWKQQYQKYNQNSNDALMKYHTSLEYKYEVTLDLENFFPTINPIIIYRYIINHLPAYLNDEERKMMKRVLQKLLFCKLTTTFDEKTAGQYYKVTKGAGNYDNVDKIEQNEKECWAFKEKSDKFVRGIPQGLPQSYFLGNIYMISIAEIFRKKFTGVSYFYVDDSVIFTNDVREDNFKEQLKELNKQIADEANNFEEDSAIYPEGTEKFYKSDLYGVNVHLDGKSNYTRLDNLDDSEVYLKCISREMSQAGSDFFRMYSDEENRNLEEKLDVLSKQVKAKRDQLVEEKSQKRDSGNEDAIEKDEDDTQKFEKRLTRYYRFFEYRKQRLVAMHQPENGSDEDYKKELEKIIYSELSEEDMEDDEKILQAFMNSYGADIWDAAIGMYQTFADDKEQNVLKNYILKINELCYGKASVEFSYLECTYRDLLRNEEENDYSVEEDIFEETLKRYMTEEDLRDIYNDPYKTLKYLARVRLKRYANKHYEVAEDYSSKLLKKTDEEILKILLSENEKLPSRLRIVCASTQKIIRMVLNTVCSYLFNVEVSNHPVLAQNSKKALTYGELRILSFVRNSLFTIEEFRKREILLDDKQNKDTADYSIMKVLEIYHSFVKDPVSIDKLIITHKYTCDVWKNGSKHLYFYTLHNQEHAIVLIQNIVKLIHAIDFLKISAIDYYILFLACYLHDISMVKIPALDSFLTDTNEADELAQELLDEFNKELQKDNLEEKVTENEIKENQNLYEDELDILSVKKYMLESYKKLDEYFEKKIRRRHAIDSSSEIRQRAEIKYLDMPMRELVAEVSEAHGADERNIYSIKSNASSRLMSIKFDKILLRLADLLDMSSYRVSKPILYHNMEQMSEESAFHWISHLLTQGYKLRTKYEIGSSKSSGTDNLKETEESLENIEGVLTPQTITEKLILEIPVDISQMSTIECENPCRKVQIGNISRQEITLICGEGCQNKSNDGLENRCNFLCRWFCVKNDYLIKELVALKEYLNRNKNNYFKCEIEIKIKCNNKTSIEARQFEILNHYIQDRKMNNNDDKERWETFCKLYDKLSSKEEMRELFEEEIKCFSLYLSHVNQDYVYNATFLPQFKDDFWNFLCAFNKKYKIVEKLFDVAEKYYNVTLKIDRYWMMTVDEKGKIKKSTLSGVDYICEKEMMIECSILYNLKRYTFRRNEMIIFGDESLKKVHEDLKAFLEKHSSKDKEESKKMEKRKDIDMLRFYGGDIHQKNKEGEYVITNNLVNPKNKEDVLWGDRDAYRTLNALLFDGIENEKERIYKEKRKLNPVFIELIENTLEIYRGIFAVMCRKKGNQLSVSKVKRVDRKASLMAYLKGHTESFVSCTNGEYDDEFASKNNIILLEIESLENTPYVDYQQVITMQEYCNYDEKEVLFPPFLSLNVSEIELTTKDNHIRDMYGQPPVGKYLLKMEEFPDYRNAITSSREELLNKILDEKDKAVLCLEHMNNNMWKEDYHEYVEWKNNLHSYLKLIYSDMWYGEREKMESGVRMLLNDMKRALDRGVKIRILTGNYLGITQPSALYLIKSELGDRVDLRLYNETSRSFHPKSYIFHYESSNEIYIGSSNISKSALTSGIEWNYRFSDTLDKKNYELFYATFEDLFLNHSIIIDDEELKRYSKAWKKPAVSKDLAKYDATEDGEDRNAENVRMLYRPRGAQIEALYALQESRMEGAAKGLVYAATGIGKTYLAAFDSAKYKRVLFVAHREEILKQAVVSFKNVRNSADYGFFDGKEKDRDKSVIFASVATLGRTEYLNETYFPADYFEYVIIDEFHHAVTDQYRRIVEYFQPQFLLGLTATPERMDGKNIYEICDYNVPYQISLKEAINKGMLVPFHYYGVYDETDYSGLRIVKGRYDEQELNQAYIGNERRYDLIYKYYRKYRSLRAIGFCCSRQHAEDMAKEFCQRGIASAAVYSGENGAYAEERNEAIRKLKNGEIRVIFSVDMFNEGMDIASLDMVMFLRPTESPVVFLQQLGRGLRLYKGKEYLNVLDFIGNYEKAGKAPLLLSGEQSFNKKGSCEYQDLEYPDDCIVDFDMRLIDLFKEIDKKKLTLKMQIQKEYYRVKGLLDGKRPSRMDLFTYMDDDIYRCCVSGSHAKGNPFQHYLDFLYELGELSADEQELYAGIGREFIQTIETTEMQKVYTMPILYSFYNQGNIRLAVTDEEVLESWKEFFDTGTKWKDFPNVNTYEDYKKVTDKQHLSKAKRMPIRFLKASGKGFFVEKDGYALALRNEIGEVVGNMAFGEQMGDVLGYRSLEYYRRRYEKIMSTPHKEKLIRVFQLFQTTDEKTPMNAVQVSQKLEEEYGMENVHRTSIYDDVRLLQSCGYPIKQAENSHKGWYMEKHLLEDWEIKLMLDSVQQARCVSVHDANEIRNKLLNLTSQRGRSRLISSSHFMARRRKMTPERREFINGLLEHYQPTDAQDVQEMLKDLLGDTLQGMLEAEMDQKLGYSKYDYQNKETDDSRNGYSHKTVTSSMGDIDLDIPRDRRGEFEPQIVKKHQTDISNIEDQVLSMYAKGMTTRDISTHLSNVYGVDASAEMISHMTDRILPIAKEWQNRPLEKKYAIVFMDAIHFYVREDNRTVKKAVYVAIGIRLSGQKEVLGMWIGGNESAKYWLGVLNEIKNRGVEDIMIVSVDGLTGFVDAIHAVFPLAEIQRCIVHQIRYSTKFISYKDIRAFMKDLKLVYKADTEQLALEALDMLEENWGGKYPSSIASWRNNWPQLSTYFKYPGEIRKLIYTTNSIENFNRQLRKVTKSKTIFPTDDSLFKILYLAMTDITKKWTGKTWDWGQTLDQLCIYFGDRIQPEDLEMERFNIYRIEMLIRHAADGNLYLYDMVNIKKETESVKYFVMKKENIIDIITDEDGRKIVVITDIRFKGKRNIDWEDVENYLKEYVGKCYEVVETADQVFIGNDFPEELKGSEDTKRLCGANAKTKANATQKIPTLLKCATNKRWQENFKGKHKVDAKYGMSRGKEVKELREKMGMNRREFSDYYGIPYRTVQDWEAEKRELPEYLLRLMKYRAEVEYMMKNKSMTEETIKEILKFRDDRDWKQFHNPKDLAISISLEAAELLEVFQWSGADISNEGKQEKIREELADVVNYCVLMADACGLDLDEIVREKIKVNAKKYPVEKAKGKSAKYDKLMYELSAKNDRLTSLRKTMKFIFRSIYGLTPSQVLSPSDITKKKYDILLVDEAHRLHQYKNISYRGAFKKSCERLGMTTDADELDWILEQSKCAVLFYDYNQVVGPSGIDYERFEEKMRNPYKKHTISYFTLATQMRVQGGNDYIAFIKDLLAGVADRKYHSKKYDLKLYSDFSKFEKDMYVKEEETGLSRMVAGYAWPWISKNDRSKKDIEIQGVKRMWNHCTEGWVHTGEAIDEVGCIHSIQGYDLNYAFVILGNDIGYDKTTGQIIIRSECYFDKNGKITASYEELKEYITNVYYVLMTRGIKGTYLYVCDDELREYFSKYIEEENMAGIKEEKKIYLVGIYCRLSKDDGTDNESASIATQKSILTDYVKKQGWHIAKTYVDDGYSGTNFQRPSFQNMIKDIESGLINCVITKDLSRLGRNYLDCGLYLEVFFPEHNVRYIAVNDGVDTLNKSAMDITPFRNILNEMYAADISVKIKSAYRARFQQGKFMGTTAPYGYIKDPADHNHLLIDDKVAHVVKEIFDLALKGNGVAKICRHLNKQHILRPAAYAAERGETGFERHFEGNEDKRYIWSGNSVRSILRSPIYAGNLVGYKRIAANMKSKKRPSKLPEEWEVIPNTHEGIVTQEEFDIVQQLITSRRLPQNKGGFVNIFAGVIKCVDCGCALRAMNVHRRKRPEIIDCVQYSCNNYARNGRSECSAHNIEARDLFNAVLADINCFADMAVNDEKAVRAIEKRLTETDQSRAKALEKERKKLNKRLAELDRLFSSLYEDKVMERITERNFEMMSGKYQKEQLEIEARLKEVTETLNESYEKSRGIRDFLALIRNYQGLKELDATVINALIDKILVSEREKMADGTVKQEIKIYYKFIGFVDELHIIPTKRWAAMPAKNCTVCGVEYVPGSGASRYCPACAKKIRREKSNESKRRSREQKRIACMNCPQKMTDMVSDWQGGDISKLFPALSGKEDLSMGEDKKADKKRKRIVPKAPVQMIISREYVGTQTVTEAFVPIISEDIRKKIAEGDTFDNEGLSAMREIQYEIVKEIAVLSTGDSGYTKEINLISWNGKEPKYDIRSFSPNREKCGKGITLNADEAAALLKALQKELNSEDMKKQDFKVLKTKDLYPFPDNPFHVAEDETLSELAESIKEFGIVTPIITRPKEDGDGYEVIAGQRRVRASELAGINTVPAFVLPLDRDRAIITLVDSNLQRENILPSERAFAYKMKSEAMKRQGFRTDLTSSQVVTKLRTDDKVAQGFGVGRMTVQRFIRLTELIPPILQMVDEGKIALTPAVELSFLKKDEQENLFATMESEEATPSLSQAQRMKQLSQSGRLDMDTIFAIMTEEKGNQKETLKINTSKLKKYFPKNTTPKQMEETIIKLLERELQRKRNRDSRMPYAILRFQKRKAGGVAACERHNERKKEAYKSNPDIDMERSKNNYHLIAPPKYTYKKEINRMVAEAGCRTRKDSVMMVETLITASPEFMNQLPPEEQKAYFQTALDFISERVGKQNILSAVVHMDERTPHMHLCFVPITPDNKLSAKAILGNQKSLSEWQTAYHERMSSRWNQLERGQSSMETKRKHVPTWLYKLGGRLDKQYEEIVSALSDINAFNAGKKRDKALDLLSAWLPDVEKFSKEIGKQQAYIDSLKERIGQESDYAGRMRDEKYEQELKVQKANQKIFELQRTNEQMGRLLSKIPPEVLEELQKNHRSRAKERMQKLQTVNAETLLYEPLEKPSFVVDSLIPTGLSLFCGSQKIGKSWLMLKLCLCVSQGIPLWDMPTMEGDVLYLCLEDTFCRIQDRLFRLTDEASGRLHFAVASCKLSDGLIVQLEDYLKDYPDSRLIVIDTLQKVRTASKDNAYASDYGDISLIKDFADRHSLAVIVVHHIRKQNDSDVFNKVSGTTGLTGSADATFVLEKEKRASDTAKLYVTGRDTPYQEYTLRFRDCRWELVERKTQEQLAKETIPDVLFRLVDFMRDKEEWIGTATELLAAMGETETIPTVITKWLNEYRTTFLSENRICYQYSRRKDGRRIALARRAGDSGDGGDSDIRIPPCYCHMAYNHGREDRKWRIWKEAEEKLLRECGVDEATIEQIRMADRADFNSNRRFYRWTNDVAEYLEDMAGRERQAEVGTVAELLEEIESENLYQVLVTVDGRTLKIVLLKMQGYSTKEIAPLVHLTTGAIYARLDHLRKKLRKILMVKYAPRKVYIRESGGYVELSYTEFCRCRESDQTYMDKLFIPIQGCLLEVVREQYTDFYRDKERWRYLQKLDTKNRLLSLDGFTDSEGNPLDFITDEAVDIAETVVNAVMVDRLKAALPLLSDSEQELIQAIFFDGLSEREVGARLGITQSVVNKRKARILIKLRKIIENMYGDCTSTFKVRSTVALAEIFLTGFLPFSDMLCIDKFCFVMKIINLGILAHVDAGKTTLTESLLYTSGAIAELGSVDEGTTRTDTMNLERQRGITIQTAVTSFQWEDVKVNIIDTPGHMDFLAEVYRSLSVLDGAVLLVSAKDGIQAQTRILFHALQTMKIPTIFFINKIDQEGIDLPMVYREMKAKLSSEIIVKQKVGQHPHINVTDNDDMEQWDAVIMGNDELLEKYMSGKPFKMSELEQEENRRFQNGTLFPVYHGSAKNNLGIRQLIEVIASKFYSSTPEGQSELCGQVFKIEYSEKRRRFVYVRIYSGTLHLRDVIRISEKEKIKITEMCVPTNGELYPSDTACSGDIVILPNDVLQLNSILGNEMLLPQRKFIENPLPMLQTTIAVKKPEQREILLGALTEISDGDPLLKYYVDTTTHEIILSFLGNVQMEVICAILEEKYHVEAEIKEPTVIYMERPLRKAEYTIHIEVPPNPFWASVGLSIEPLPIGSGVQYESRVSLGYLNQSFQNAVMEGVLYGCEQGLYGWKVTDCKICFEYGLYYSPVSTPADFRLLSPIVLEQALKKAGTELLEPYLHFEIYAPQEYLSRAYHDAPRYCADIVSTQIKNDEVILKGEIPARCIQEYRNDLTYFTNGQGVCLTELKGYQPAIGKFICQPRRPNSRIDKVRHMFHKLAMAKSLFEELGGKYERQGDYLIPCLTVPAEEEQAIGIWGQRHLDYLKQYRKVTYTNLLTSGRLNAYLADINRQAQERFERLIEGMKQAQGITEQLKAENALEWTGCLNNIRACAREIVEKEIIFAMFKIIEGDFKNNKYSNEEYLDNWPMLYILENGKKAYIGESNHVKTRMTQHTTNEEKRIFNKVHFIYSRLFNQSVTFDYESKLIQYIVADELFQVTNKNSGIADKQYYEKGKYDKKFELLWRKLQQEKLVKHSLEEIENSDLFKYSPYKELNDSQRKAVEDILAQIESGNVNRVVVNGMPGSGKTIVAVYLMKYLADSEEFAGKKIGFVVPQMMAKIFITLTGTKHYFGNDFLEKGMKIRLEKEPDNEYDKEAIKVTYEGLGKIGYVANSSYTVIGESMSAGRLYDKIGDTAYAKVVLVTPAGTICKICKKSLKSEQEETAWIMLMAKGIFVTGTGTDVGKTYVTALIVKKLADAGIHAGYYKAALSGAESIEESDAGYVKKIAGITQEDSSLLSYLYQNAVSPHLAARIEGNPVDPETVKADFDRVKKAFDYVTVEGSGGIVCPIRWDEEHEILLEDIVKMLHLNTLVIADAGLGTINAVVLTVEYIRNHGMDVKGIILNHYSGGAMQEDNEKMIERLTGVPVIARVRDGDRELEVDLEVLKRVYDMNTKTKKLSTVSMVLCGMFAALVAIGAFIQIPVPYMDYFTLQFFFVLLAGLILGADKGAISVGCYVLLGLVGVPIFAAGGGIGYIFRPSFGYLVGFIVSAYVTGKVCEKLKASYKNYLLACLAGFVVTYAIGIVYKFIILNFYAHTPATLGVIFLSCFPLDMPGDFVLCLLAAGVGLRMRKSGFYLSMPKGTNQKLKLYRLAQIMLENTDDEHYITMPEIMEELGKYEVTADRKTIYADLRDLSVLGIEVEGEPIGNRYHYRVVNRPFELPELKLLVDSIQSSKFITEKKTNTLIKKLEKLVSKYDAQRLQRQVYVSGRIKTMNESIYYTVDAIHNAISKNKKIKFQYFQWNVKKEMELRHGGAWYHISPWGLSWDDENYYMIGYDTEAQLIKHYRVDKMLHIRMSDESREGREHFKKLDMADYAKKSFGMFRGKETSVKMLVNNSLAGVIIDRFGKDVMMIPEDEDYFRVNVDVHVSKQFLGWVFSLGEAVKIIGPDEVVEQMRGEARRLMEQYGEMLTGNSHAFDNGTAAGNFLYQMIQMDLFAKSGIRVYYAGDLDPEGILIAQKLSQYYKGEFHYWHMETADYEKCRSEEVISPKRMKILERITDGRLKPVVDRIEEYGTAVYQEMLVEEMMQVSDKLIKPLTEAKYLNADNVSRYRCIMRIFFEHYEKLKYWLYQEEVYEEMIQDPLFADYRPEQCQMKGFNTGDGYMGMVDGEYILFASEADYYDYVNDMQKKVQIVSDGSLDLSQEITKEHDIEVVPFYVSFDSETYQKEMVELGVRDFYNEMVEYPDVFPKSSMPSVDDFYQVFEKSVKEQIPVICICITRKFSGSLQSATVAKEMIEEEYPDAKITLIDSTVNTVLQGLFVLEACRLRDMGLGYEEIVEKILPIRETGRIFFTIGSIDYLRHGGRIGKLAGIAAGALGIKPMITLKEGEIFSSGLARNRIKSMKKVVDMTKNYLDEIDAKPGEYNFCIGYGYDYDEAVRFREMIKDLIKERLGIDEIGIYQIGATIGVHTGPYPLGVGIIKKAEVMVNQILLHISNTPLELVEYCQKKGIAVEAYSPIAHGEILHQPEIASMAEKYGVSVPQLCIRYTLQLGAISLPKTGNPEHMKTNADVDFEISAEDMEVLKNFKHIESYGESSGFPVYGGKLMNKPYIICHMMTSVDGRIDCAMTSQLPGVEDYYKTLDGLNVPTTVSGRVTAELEMAEPGFFEAKNSETYTQEGFSKKADAKGYEIIVDTKGKLLWPDASDMDKPYLIITSEQVTKEYLAYLDGQHISWIACGKERIDLVRACEILASEFGVERMGIVGGPAINTGFLDAGLLDEISILMGAGIDARREMPSVFDGFAMDHPLVHLKLTNVQRFDSDAIWIRYNVMKATGCKKIYNAENIIEAEMLVEMLKENGIAAFTQEPSSSVAAYGVAGFGVYGVDIWAEADEAEKAVQIIEEIEKSLDTENAEMRVTGSQDRNFYRIMDSGAKITKGNQTYYIYMEVVTADKEHPENKGIQIIDLATKKAYNDRYFLWHSKKGIFTQEKVCEDYRTMLIFGKMEMNGNVENYMKELWGIMKRCKILRAVGTDGEKKNNIYAGCNIDIWMRENISEMTKEQIIGALKAAAKPYEEYYIDDEVVDAINTYSNPYELVAPILEIIADNPSVDFGMPGELVHFVEQFYKNGYEELLIASVSEKPTPHNIWMLHRCYNDINNPQRDKFAEVIRELKNEESISVEIKDAIDEFDWEMIIQEIKESGCEFRVIKLKGTGKNALDFYIAAECGIISERGENEIAIISNDKGFQAVIDFFGADQNANRIQIVKAGNIENALTLFHAPEDAERRKKIQNRKLLLDLSAESARIEEGNRIKKELKNILTGTEYECKSAEIIDFVSAKRHQGKKDLYMGALHQFGRKDGRKIYQLLKRKMSEMDILDKERLKECRLKLGITKQEAAKRIQISQPAYLRYEAGSRNPSIQIISKMAEVFSTSTDYLIGKSADSSPNRLVVEQSDTPALFSLVETCKTLNAAQLMRLTAYAKALSNVTSDSEKMSQKNHKMTDGKLLQTDKKYAQLKLKQKEKIAEWMFQVTRDYYTKNYTFPNDRQIEKVVNIVYEKIEEAEIWVPYGEVLRHYKSKRSAINRRVRKELNEKEENRNEKVCFMNMCMVQDDKGNVLALDKVNDSYTGTTFPGGHVEQNEIFQKSIIREVWEETGLTIESPKLCGLYHWHEDGVHSVIMLYKAEKFIGELKSSEEGQVYWIPLEELKTRELATGMKYVLQILGADQVNECYMHLESEGYVGDLYMNPKDEVKFEDIKKLVNASLEKFYKNDRDLIEMSNEEDMISEQCMVFHIGSYMKNKMNTLTKFQWADLDCEYNRNMNDPKMMRSDRKIIPDLVIHRRRSNRNNLLVIEFKKKNAETYDKENDRNKLMYLTDQKEDFKYNFGLFVELGSHEVYMEVYQEGNLQTKLNYSITYMYTLEDLFDRRSPVGTRLEQILMEKKCTKAELSKKTGVSRPTIDKVLSGTITSKKNYETHMSKIMNYLQITPDILLGNNACSSNRVREIRSIIRISTEKMASATGISQERLQQIEAGEKATITELREIAMQLRTSTHVITNQYFFEPQFSEMEYYMDMKDALDEISGFWGHVGIKLCGIDKYMWYPINSNTRKMIYKGIDEELMVIPCMNNKVLFLNMSNIEDITLSDFDADTPSGKNWDEHVSCGEIPLVVYEALEDYEENSQVTLYNDTENSTELYKYLMEYVRKNGWTEEDIFQLLNTSVFYYLDGRKKSTIIDFYQDSDDIIETIEMVYGYDFTDIEQNFMFYIDAHDETENFVNLKGISMMELPLLKVEEEIFRRNDQMKKELVIVIDFGGQYNQLVARRVRECNVYCEIYSYKTDIEKIKAMNPKGIILTGGPNSCYEADSPTYKKELFELGIPVLGLCYGAQLMMHVLGGKVESAPVREYGKTEVLVDKKDSKIFEGVSEKTICWMSHFDYISQVAPGFEITAHTADCPVAAAENTEAGLYAIQYHPEVLHTAEGTKMLSNFVLGVCGCAGDWKMDAFVENTIREIREKVGDGRVLLALSGGVDSSVAAGLLSRAIGKQLTCVFVDHGLLRKDEGDEVEGVFGPNGQFDLNFIRVNAQQRYYDKLAGVTEPEAKRKIIGEEFIRIFEEEAKKIGAVDFLAQGTIYPDVVESGLGGESGVIKSHHNVGGLPEHVDFKDIIEPLRDLFKDEVRKAGLELGIPERLVFRQPFPGPGLGIRIIGEVTEEKVKIVQDADAIYREEIANAGLDKNINQYFAALTNMRSVGVMGDERTYDYAVALRAVTTVDFMTAEAAEIPYDVLNKVMSRIINEVKGVNRVFYDLTSKPPGTIEFEMGKSKKEKRQAYFFDNKALLALILPLVVEQLLAVLVGMADSIMIASVGEAAVSGVSLVDQIMVLLINAFSALATGGAVVAGQFLGQDRREEACKSATQMVWFITICAIGITVLVYLGKSFILHTVFGKIDQDVMHHADIYLLIVAASIPFMALYNGGAAIFRTMGNSKVTMQISIIMNVINIGGNAILIYGFHRGTEGVAIPTLVSRMTAAIIIIVLLCDEKRTLHIERTWRYRINWEMVKKILSIGVPNGLENSMFQLGKIIVLSLVSTFGTYAIAANAVSNAIALFQILPGMAITLAITPVISRCVGAGDYEQAKYYNKKLMLITYVSMTAMVLFIFSLLPFILNAYNLSDLTAKTTADIIHFHGIGAIFIWPVAFSLPATFRAAGDAKACMYISSISMWIFRIGFSYVLGKYMGMGVFGIWVAMVIDWVFRAMCFVIRYFKGSWKKNAIVMSTKNVIFSNPGDVIDFVKIVEKYPFDMDMKRGRYIVDAKSLLGLMNLGFDQKIELKVYDEECDDLWKELDKFVAAMRIIVIEDNELYKNELLQCLEQEESDIEIVGSASNGAEGLALTEKLIRDNLTPDVIFTDVRMPEVDGFEMIEALQRRGISCKIVVTSSCPEFLYAKRAMELGAVDFLVKPLKVYEVRNVLGRLRRELESEKKWKHILNLEYIFLNAMAGKIKDDQQIGDLIKEGYGIAPEERIGVLGIGMSSNYEKYKEQVLQMLKELEIFNQQQDFCAYTIEMYGRQSFVVLFYHMGNEHETYQYLEQTIVPMICNTVRGRVICTWAVSNGFGNMYEAVRELDHAAEWNLILKKGTLICKEKIQKIALYPYKYPVNLEKEAKEALLNKDAKRLKKIFSRYWDYCRELPCTPQEAKEGCIRIALVLIQMAAETGAVQAQRKGQTFLQRISRANGWTDVEEKVDTFFEYLTSKDEAENDMSLLIQKALENIREYYDQGITLEEIAEKLHVTEEYLSTQFRKETGRTFTETIRGYRIERIKELLTATNWKLTKIAELAGYTDPKYMSRVFKEETGMLPLEYRKKNGMATVGGNRQEKRKRIMSYFINATIELMEKEGIENLTIRKVAEQAKYNSATLYHYFSNLDELELFASVKCLDEYMQETLIHKAEGKDFQEWYLGQWRCFCRHSFQRPRIYNFLFFSPEGTQNLNEVFRRYYEIYPNEKEEKTEDYEGFLKEGDFFKRNEDLLRDVIRERNYVISEQEIKELNEMSVLIYRGMLAIMRSDRDKPTVDEAVDKTVRYLAKTLDAYHLGMGNKRTKKSISLEGFVFLAIFLGIFGGMGMKMGGVNMLNTLMNTGYQLLLETVFYIMAIAVLAGAISGLFSEFGVISMVNKLLSPLMKPLYNLPGAAALGVITTYLSDNPAILGLAEDKNFRKYFKKFQLPALTNLGTSFGMGLIVSTFMIGLKLKGGHAGTAVLVGNFSAIIGSIISVRIMLHFTKKEYGTEEYCVQFEEHEDMDAIMNTREIRDGGIGGRAIEALLEGGKNGVDVGLAIIPGVITICTLVMMLTNGASADGTYTGAAYEGIAFLPWLGKKLEFILSPLFGFTDASGISVPITALGAAGAAIGLVPHMAEAGTVLANDIAVFTAMCMCWSGYLSTHVAMMSSLKVNKLTGKAILSHTIGGLCAGVAANWIFKLVMLFLMKDYIEERAVEIAYYIIEHKATVRQTAKEFGVSKSTIHKDCTDRLEQINPTLAQSVRKVLDVNKQERHIRGGLATREKYLHQHRHAGMEWNFLFFMNSVLLGVGLAMDAFSVSLANGMNEKNMKKSRMAYIAGVYAFFQFLMPMIGWICVHTIVQVFGQFQKFIPWIALILLLYIGGSMIKESVQSEEEKKEVKRLSFAVLMMQGIATSIDALSVGFTTAGYGLVMAVVCSLIVAVVTFVICETGLCLGKTLGTKLSGKADVLGGVILIGIGIVSWGRGMMSHYYMFHKPFGCVTARRDDRYPTVMDYFKELHNDRLSPVGRLDRETTGLLLITDDGIFNQKLTHPSYHKEKTYEFTLLGDLTPELVHKLETGVILKGADTLTAPAKITVTGHAVMSDILSTLPEEIQKDIHKNRPDHPITYGIITISEGKKRQIRRMMKSVHCCVIELKRISIGDIVLDKALCPGEWKEIFPHTMKKKVAMLLTGVMAVSLLMTGCQSTKGLENDNIKISVYKGVEVDKVDKPSEVTDDDVNTQIQSVLDENATTKEVTDRAVKKGDTATIDFVGKMNGKAFDGGSSTDYPLEIGSNSFIEGFEDSIIGHKIGDTFDWNGKFPENYGSSDLAGKDVTFTITVKSISKKNTPKLTDKLVKKVSKKSKTVKEYKEEVKKSLEEDNEKTYNDTLQQAAWQKVLDNTKVKKYPEKDVKKIEDSLISQYKSVAKAYNMSYDDLIKQQMGTTVEKFEKQVTKAAKSSVKQTLVTKAIADKENIKLDDATYKTELKKIAKEYGYDSVKALKKAASKSDLKEIALNDLVKEWLANQCIQVESSSSSSSSSSSSSSSSSSSSSSSSSSSGNMKTFTIVLLVILVILIVACVALYFVGKKAEKKQADQQAQLDAVAQTVSILVIDKGRMKLKDAGLPDIVLENTPKYLRRSKVPVVKAKVGPKIMTLMCDAQVYPLIPVKKEVKATISGIYITAVKGVRGPLDVPEKKKGFFARLRNKMTKDVLLSISGLHQDVTGIEAQGDEPGSEPIEVIAPASYYEKNGKRYVIYDELVEGIPGTIKNKVRILDDQKVEIIKSGITNTHMVFEKDKINMTQYETPYGEMMIGVFTKDIQFEEQDEKITVHVNYALDINGDPVADCNIDIKITALERMENKNRNTAAIGVFDSGVGGLTVTREIMRQLPNENVVYFGDTARVPYGSKSKNNIIRFSRQIIRFLKTKNVKAIVIACNTASALALETVQQEFDIPIIGVIVPGARAAVRETRNGQIGVLGTEATIKSETYTKEIRKLMPEAEVIGKPCPLFVPLVEEGFAKHKITEEVIDIYLSDMRKSEIDTLILGCTHYPLLRSRIMAYFGESVHIVNPAYETAMDLKQILEKQKIANTSGKPAAYDFYVSDAAEKFKKFANSILPYDVDKTQAIDIEDYMADKKVIRTIGVLTSGGDAPGMNAAIRAVVRTALGKGLKVRGIRRGYQGLLNEEIIDLSARDVSDTIERGGTILQTARCAEMRTEEGQQKAAAICKKYGIDGLVVIGGDGSFAGAQKLANFGINTIGLPGTIDLDIACTEYTIGFDTAVNTAMQAIDKVRDTSTSHERCSIIEVMGRDAGYLALWCGIANGAEKILMPEEHDYDEDKIIADIQESRKRGKKNYIIINAEGVGDSMNMAKRIEEATGMETRATILGHMQRGGSPTCKDRVYASIMGAKAVDLLLEGKTNRVVGYKHGEYVDFDIDEALGMTKGIPAYQYEIAKELALMSFAHLHVHTEYSLLDGSNKIKECVARVKELGMNSVAITDHGVMYGVIDFYRAARAAGIKPILGCEVYVAPGSRFDKEAVGSGDDRYYHLVLLAENDLGYHNLMKIVSRGFTEGYYYKPRVDLEVLQEFHEGIIALSACLAGEVQKNILRGMYEEGKAAALRYQDIFGKGNFFLELQDHGMQEQQIVNQSLLRMSQETGIELVATNDVHYTYAEDVKPHDILLCIQTGKKLADEDRMRYEGGQYYIKSEEEMKQLFPYALQALENTQKIADRCNVEIEFGVTKLPKYDVPEGYTSWEYLNKLCFDGLKERYPDGDDSLKERLEYELSVIKSMGYVDYFLIVWDFINYARTQGIKVGPGRGSAAGSIVSYCLGITSIDPIKYQLLFERFLNPERVSMPDIDVDFCFERRQEVIDYVGRKYGADRVVQIVTFGTMAARGVIRDVGRVMDLPYAFVDSIAKMVPTELNITLDKALKMNPEFKKLYQEDEQVKELIDMSRRLEGLPRHTSMHAAGVVIGQRAIEEFVPLSLGSDGSVTTQFTMTTLEELGLLKMDFLGLRTLTVIQDAERLASISSGKTIDINKIDYDDKAVLASIGTGKTDGVFQLESAGMKNFMKELKPQNLEDIIAGISLYRPGPMDFIPQYIKGKNNPDSITYDCPQLEPILAPTYGCIVYQEQVMQIVRDLAGYTLGRSDLLRRAMSKKKGDVMQKERQNFVYGNPDEGVPGCIANGIDEKTANKIYDEMIDFAKYAFNKSHAAAYAVVSYQTAWLKYYYPVEFMAALMTSVIDNPGKVSEYIYSCRQMGIKILPPDINKGEGSFSVDGGNIRYGLAAIKSIGKPVIESIIQERKNGGEFSNLKDFIERLSGKEVNKRTIESFIKSGAFDSLGGTRKQFMVVYVQILDQVNRERKYSMTGQLSLFDIVSDDQKSEFDIPLPDVGEYEKETKLAFEKEVLGVYLSGHPLEDYEEKWKKNISRTTLDFQIDDETGRTKVHDGAKEIVGGMITNKTIKYTKTNKVMAFITLEDLVGSVEVVIFPRDFEKNQMYLNEEAKVFIKGRVSEEDDAPSKLICEQVIPFEQTKKELWLQYPDKATYLQQEGMLQDILKVSEGMDEVIIYCRKEKVVKRLAKGWNVTADEVLLSRLTNYLGESSVKVIEKPIESVHMKVQNITDIEGFFKVVDSCEGKVELVTGEGDRLNLKSKLSQYVSMANIFSNGEIPELEIVAHEPEDIDKLVKFMLLGNGKEDMGLTDYLGKKRRLMIVKEVEFGVYLGNKDDKVLLPKKQVPKDVEVGDPVEVFLYKDSSDRLIATTQEPKITLDELAVLKVADTGRIGAFLDWGLEKDLLLPFKEQTAKVKKGDEVLVALYVDKSGRLCATMKVYEKLRTDSPYKKDDHVEGIIYETSDNFGVFVAVDDCYSALIPKREAFGRLRVGDRVSARVLKVREDGKLDLSVREKAFLQMDADAAMIMKRMEEYGGKLPFNDKADPEVIKQEFGLSKNAFKRAVGRLLKEGHIKISEKNIEMKKKMRDNQYTIDGRIRFSEVDHTRRITLPGIVNYFQDCSTFQSEDLGLGIEHCSEKKRAWILSSWQVVVERYPKIGEKIQTSTWATDFNGLFGERNFCMTDSEGKDVAYANSLWVYMDMEKGRPSRPEESEIAPYGVGDPYEMEYESRKIALPKEAKELESFPVRRYHIDTNEHVNNCQYVQMALESLPKDKEVHQMRVEYKKSAVYGDVIYPRIAIEEDRTVIELCNEKARPYAVIEFKFAMKRETICLIIACLISFILTAGIMNWRMEIVHAELSDTQQSLAKEVFRFHVIAESDSANDQRIKLKVRDAVLKYMKAHMTRAERRDAKATKAWTLTHKKELTDTADKILKKEKVSYRAKAEVTTCYFPDKRYGDIIFPEGNYEALRIVLGKGNGHNWWCVLYPNLCFTNATCAVVDEDGKKELKEALSAEEYEMVTATSEFKIKWFFFGKDHAKESDMESNFKVNMNEYLPLRDVVFNTLRQAILRGELKPGERLMEIQLANKLGVSRTPIREAIRKLELEGLVLMIPRKGAEVAEITEKNMRDVLEVRKALEELAVQLACDKITKEEIEEMKKAAEDFKKILKSKDITEIAEADVRFHDIIYMATDNQKLIQLLNNLREQMYRYRVEYLKREEAHPQLIAEHAAIIEYISKGEKKAATDIMCKHIDNQVTTVIDVIRTKQNMDKMELKALGKINLGLDVLGRRENGYHDVRMVMQTVYLYDQIRIEKTKKPGIELSTNLFYLPVNENNLAYQAADLLMKEFDVKEGVKITLDKHIPVAAGMAGGSSNAAAVLFGINRMFSLGLSQKELMERGVTLGADVPYCVMRGTVLAEGIGEILTPLPACPKCHVLIAKPPISVSTKLVYEKLDSHEIEDHPDIDGIIDGLKAHDIEKVASSMGNVLEKVTIEEYPVIEQIKNVMKEQGALNAMMSGSGPTVFGIYDSKEKARKAAAKIREKQLAKQVYVTGIHNARRKMEYLKKEIRTFQNGKTVNDQFYIDDDYNVPDAKKDVGRIIISDGTLQVEEMKQVENYLKVTGKLEFRVLYTADETIPEPASLEGRIPFEEMIYLEQEPDGNLVLKTADVDLTVTVIHSRKLNIKTLAEITIGMEKCVGEELTTDIEGENPVFKKTKEEELLKVFATGKDTYRIKEEVSLSGTKENIGTILWTDVTGGKADTQIGTDELLIQGELNIFCLYESVEEKTDWINRTVPYEGRIECMGTVPGMYHQASLNLTDVNVEARMDENGEMRILGIEATLEVRLVVYEEEKIQILEDMYMLDHVCVPDIKEKKCFRLKLQNHSKCRIAEELTLPELKDNILQICYCKGKIQPESTKAEEDGIHIEGVLHLMFLYVREDDQMPFGVWQGMVPFTYLLENGGGEPEAEELDWTVEQLSVGLMGNGEVEVKAVLAFNCFQKEPVMVQNIESAKFTPMSTEELENRPGIVGYFVKNGDTLWNLAKKYNTTVENIKEVNHMEKEDVNKGDKILIFKQNLSILMKKRRWTVAAVAVMLLFTGCSFGTLKEQKTGEIEYEIVKKEEIPEKLKEEIAEAEKSEMWISYADTGNEGRYLYIVRGYGRQETTGYSIEVNECYETEHTVVVRTTLLGPQKKEKTHKKKTYPYIVIKIPYTDKQIIYEMIRLIFVALFVVLFLIIGIPVLGIEWLIGKVSKKTMDYSSLRLVQWAFKMIIKLAGIELTVIGEENISEGPVLYIGNHRSFFDIVITYARCKNLTGYIAKKEMLSIPLLRTWMKRLYCLFLDRENPKEGLKTILQAIDYIKHGISICIFPEGTRNKGEELSLLPFHNGSFKIAEKTGCPIIPMSLNNTCDIFEGHFPFIKKTHVILEYGKPIYPKELDKDEKKRIGEYCSNIISETIHKNQALVMSKRNLTLLTDLYELTMMQGYYEKGQNENVIFDVFFRQNPCNNGYSVCAGLDQVIDYIKNLHFTYDDVDYLRGLGIFKEDFLHYLSGFHFSGDIYAIPEGTVVFPKEPLLKVVAPIMEAQLVETAILNIINHQSLIATKTSRIVFAANGDGIMEFGLRRAQGPDAGLYGARAAMIGGCVGTSNVLAGQMFDVPVMGTHAHSWIMSFPDEYTAFKTYAEMYPDNCTLLVDTYDTLKSGVPNAIRVFQEFKDAGKPLIKYGIRLDSGDLAYLSKEARKMLDEAGFPEATICASNDLDEFLLHDLKMQGAAIDSWGVGTNLITSKDCPSFGGVYKLAAIQNEEGEFVPKIKISENTEKITNPGNKTIYRIYEKASGKIKADLICFADEVIDPKQDLLLFDPMDTWKKTKLAGGTYTVREILLPIFKNGECLYKSPTLKEIAAYCREEKDTLWDETKRLFYPHRVYVDLSQKLYAVKQSLLDQMTMTDMKIIVLAGGLSPERDVSLLSGAGICKTLREMGHQAFLLDVFFGLPCDSDKLEDVFDRPDGGLEISKGISTSVPDLDALRKSRPDPSPSEIGPNVIELCQMADITFMALHGSIGENGKLQATFDNLGIKYTGPNSLGCTLSMNKLVTKQIFKTNGVPTPRGTSLTSKTKDTPLDELGYYLPLVVKPCSNGSSIGVYICHTEEEYYDAIHKSFDVDNTDEVVIEPFIKGREFACGILAGKALPLVEIVPKDGLFDYANKYQAGGASEICPPVSLDEETQELIQRAGERAFEALRMDVYSRADFIVSDADGEFYCLEMNALPGMTAASLLPKAAKAAGYEYSELCEAIIQESIKARYMKNLSIENITKACRGTFHGDESILSQEVSGVVIDSRKVQPGYLFVAIDGERVNAHKFIPDTVKAGAMCVVSHEDLGETDFPYILVESTGQALLDIAKLYRDSFDMKVVGITGSVGKTSTKEMIASVLAQKYHVHKTLGNFNNEWGLPITIFDMPEDTEVAVLEMGVNHFGEMRRLSSVASPDICVITNIGIAHLEFFKTREGILQEKSQMIQDMKNGGSIILNGDDDLLSKMSPVKGVTPVFFGMGDNCAFRADNIEPQGLRGTSCTITLKDGSSFDCLVPVPGIHMVSNAVAGAAVGYTLGLTADEIKAGIESLPSIPGRNHIIETDHMIILDDCYNANPISMKASIDVLNMAIGRKVAVLGNMGELGDTAEALHAEVGTYAAEQNVDLVCGIGDLTRSLVEEASKGANTEALWFADNESFIQAIPDIIKDGDNVLVKASHGMNFPQIVHALEELMDYQILVLDLDGTLTNSKKEITQPTLEALIEIQEAGKKVVLASGRPTQGVMPLAEQLHLEDYGSYILSFNGGRITDCRTKQAIYNKILPADCIQGIYETVRKYASQGIDVLTYTPEHILSGIKSNQYTELESRINQMPVIDASENFLDCVPDDPNKFLVTGDPAVLDQIRKELSKQFHSYLSVYCSDPFFVEVMPAGIDKAHSLLKLLTSIGLTTEQMICCGDGYNDLTMIETAGLGVAMANAQPAVRETADYITKSNDEDGVLHVINEFMRMSKKNDTDNHIEIEKRKSMLTDCVLCPRNCHADRINGRWGRCHETAEIVVARAALHMWEEPCISGDAGSGAVFFSGCPMGCVFCQNHNIAEAKAGKTITVERLSEIFLELQEKGAANINLVTPTHYVLQIIEALDLARKEGLSLPIVYNTSGYEKPETIRMLDGYVDVYLPDFKYMESELAAAYSGAPDYPKYAKAALKEMLHQTGNIQIDKDTGMIQKGVIVRHLVLPGHVKNSKAVIKYLLETYQDQILISIMNQYTPMPQVSGDPLLSRKVTKREYEKVIDYALELGMEDGFIQEGEAAKESFIPEFDCEGVMRDYIISCCSTADLTEEHFKARDISYICFHFELNGKEYADDLGKSIPFDQFYAAMAAGADTKTSQVNAEEFEEYFEPFLKAGKDILHITLSSGISGVINSAMIAKENLEERYPDRKILIVDSLGASSGYGLLMDKLADLRDEEKSLDEVFRYAEKHRLNVHHWFFSTDLTFYVKGGRISKTAGAIGGVLNICPLLNMDNQGRLIPRYKIRTKRKVIRTIVDKMAEYADHQTDYNGKCYISHSECYEDARAVADLVESRFPYLNGKVEINNVGTTIGSHTGPGTVALFFWGDTRTEMKTAVMTDTNSGIMKAEADSMGIFLIPMPVIIDDETHYEGIDLTEDSFYGSLTGGQNVSTSQPSPGDLMDLWDDILEQGYDEIIHIPMSSGLSASCSTAISLSDDYDGKVQVADNHRISVTQRESVMHAKKLAEAGKSAKEIKEVLEAEAYNSSIYIAVDTLEFLKKGGRVTAAGAALGSVLNIKPILTIQGGKLDAFAKTRGMKKCKQKMVEALKNDRETRFKDADDKHLLVGAAGSNLTEEEAAEWKQMLVEAFPNSYVYYDPLSFSVGCHIGPKGYGMGISVCSKDYDKMDYYKRALELNDETVKNRRYFHTNAETGLHMPMACAYVMDKLTKYGLTPSRCGEGVTATVGNGGKVLLLRADMDALPMPEESGLPFACPTGKEAHACGHDFHAAMLLTAAKMLKENEAELKGTVKFMFQPAEETFEGSKNMIEHGILENPKVDAALAYHVSPGQMPVGIYMYNSTGTMMYSVDGFHIEIKGKGSHGAYPQNSIDPINIAAHVYLALQSIIAREVDPSKACLMTVGKFQAGTAANIIPDTAVLEGTIRTNDKASRELLVRRMKETAIRTAETFGGTAKITMISEVPPLICNPEFTEQIVGFMKELDIPKLTPYPGISASASEDFANIAEQVPSAFMYLSAGYMDDRGKYSAHNPKVQFNEDVCPIGAACLAHCATRYLNMSEITVIALDAMGGDNAPGEMVKGAVDALGREQDIKVYLLGKEDIVNAELQKYTYDKNRLEVVNTTEVIETAEPPVNAIRRKKDSSIVVGMKMVKEGKADAFVSAGSSGAILVGGQVIVGRIKGVERPPLASLIPTEKGVALLIDCGANVDARASHLVQFAKMGSIYMEHVVGIKNPKVGIVNIGAEEEKGNALVKETFPLLKEEKELNFIGSVEAREIPHGQADVIVTEAFSGNVILKLYEGVGAVLISKVKEGLMSTLRSKIGALLIKPALKTTLKSFDASEYGGAPLLGLNGLVVKTHGSSKAKEVSNTLIQCVTFKKQKINEKIKESIQSEQKSAEMELEKLKEIIADVLNVEVNDITEDTTFVDDLGADSLDIFQIIMGIEETFDIEIDNDDAEQISTVGDAVEQIKNATNNNMSKDLKELEGKIGYKFDDFTLFTKAMIHSSYANEKHLPKYECNERLEFLGDAVLELVSSEFLFHNNPKLPEGELTKTRASMVCEPALAFCARDLDLGEYLLLGKGEDATGGRKRESVTSDAMEALIGAIYLDGGFANAKEFIHRFILKDLENKKLFFDSKTILQEIVQANFKEVISYHLIGEEGPDHNKIFRVAVHIGEEEYGVGEGRTKKAAEQEAAYISILKLHEKNIKMYLKSIEVQGFKSFANKIKFEFHNGITGIVGPNGSGKSNVADAVRWVLGEQRVKQLRGGNMQDVIFSGTENRKPLSYASVAITLDNSDHKLPVDYEEVTVARKLYRSGESEYLINGRACRLKDVNELFYDTGIGKEGYSIIGQGQIDKILSGKPDERRELFDEAAGIVKFKRRKSMSVKKLEDERQNLVRVNDILSELEKQVGPLERQSEKAREYLKRKEELKTYDINMFLLEMERIRDQIRGLEEKLRITKGELEEATRQYADTKTEYEAIEEQVEVIDASVEKANRQLNETTILKQQLENQIALLKEQIHSARMNDEHFDQRASVIDSEMDVREGQMKELQTEKDSIVKQMEEKQSEEDQIKNELTELQAKIAQIAGSVDEKKNHIMEILNNRASTKAQIQKFDTMMEQIQVRKSQINREILANDSEIAEENENLNKYQMELKVISDKIIALNNENKEYESNIKTLQAQISRESQKLQIGQSAFHREQSRLESLKNITERYDGYGNSIRKVMDNKDREKGLLGVVADIVKVEKDYEIAIETALGGNIQNIVTEDEDTAKRMINFLKKNKFGRATFLPLTSIRANSGINRPEALKEPGVVGTANKLVQVENKYKTLADYLLGRTLVVDHIDHATMIARKYHQSIRIVTLEGELINPGGSMTGGAFKNSSNLLSRRREIEEFEKTVQKLKQEMTETEQQICGLKDERAGYYEKTDAISAELQKAYVVQNTAKMNADQSSAKIQSFKQQFDNLRNEAAKLDTQINEIMDNQESINIELDTSESLENDLNINIEKEQKELEEIHAKESFKTRKSEQIHLEYAGLEQKYTFITENIIRIREEMDKFRAELEELTKNKGGNSQEIAEKEKKIQELKTTIDNSGDLFDEIKLQIERSKREREELNKRHKSFFEKREEISKHMTDLDKEVYRLESQREGYEEASEKQINYMWEEYELTLNHAKELRNPNLTDLADMKRRIQELKGEIRALGNVNVNAIEEYKSVSERYEFLKGQHDDLVEAAETLEQIIEELDNAMRKQFKEQFARIAAEFDQVFKEMFGGGKGTLELMEDEDILEAGIRIIAQPPGKKLQNMMQLSGGEKALTAIALLFAIQNLKPSPFCLLDEIEAALDDNNVDRFAQYLHKLTKYTQFIVITHRRGTMTAADRLYGITMQEKGVSALVSVSLLENELDKMGFFEKLVAGLGKTRDNIVSGMDSIFHGFSRIDDDFYEELEEVLIMGDLGVQATYDILDDLKAKVKEKHIKEPMECRELLIESIKEQMDIGETAYEFENRTSVVMVIGVNGVGKTTTIGKLAGKLRAENKKVVIAAADTFRAAAGEQLKEWANRSQAELIGGQEGSDPASVVFDAVAAAKARHADVLMIDTAGRLHNKKNLMEELRKMNKIIDREFPEAYRETLVVLDATTGQNALQQAKEFNDVAEITGIVLTKMDGTAKGGIAVAIHAELGVPVKYIGVGETIDDLQKFNADDFVNALFERPKDDEASEEVSENEMLTLEKFKQASAIVKEVTLPTKLVYSEYLSKQTGADVYLKPENMQYTGAYKVRGAYYKISTMSEEDRKKGLVTASAGNHAQGVAYAAKKFGCKATVVMPTVTPLIKVNRTKSYGAEVVLHGDVYDDACAYAMKLAEEEGYTFVHPFDDLDVATGQGSIAMEIFEELPDVDYILAPIGGGGLITGVSTLTKMLNPNVKVIGVEPAAAASMTEALKERHPVTLASANTIADGTAVKRVGEKIFPYAEKNIDEVITVADDDLIGAFLDVVENHKMIVENSGLLTVAALRQLDLKGKKVVSILSGGNMDVITMSSIVQHGLIQRDRIFSVSVLLPDKPGELVRVAATIAKANGNVIKLEHNQFVSTNRNAAVELRITLEAFGTEHKHQIMKALEDEGLSPREVNAKLYMENRKVYLDDHTNLLQLEEHMYPLVDVKTPNVFRNLFHYDEIPKIAFNDRIVPHCMPDEIWITDTTFRDGQQSRAPYSTEQIVTLYDYFHRLGGPKGKIRQCEFFLYSKKDRDAVYKCMEKDYKFPEITSWIRASKKDFELVKEIGMKETGILVSCSDYHIFYKLKMTRREAMEHYLSIVRECLETGISPRCHLEDITRSDIYGFVIPFCLELMKLMDEYKIPVKIRVCDTMGYGVNYPGAVIPRSIPGIIYGLRVHAGVPSELIEFHGHNDFYKAVSNSSTAWLYGACGVNCSLFGIGERTGNTPLEAMVFEYAQLRGTLDGMDTTVITELADYYEKEIGYHIPSRTPFVGKNFNVTRAGIHADGLLKNEEIYNVFDTGKFLNRPPLVAISNTSGLAGIAHWINTYFKLPEDKKVDKNSELVSSVKEWVDKQYEEGRVTVLTDDELIRVIDENCKRIGVELIMEEYQDRSLRGRVFRHLREDILNGVYKNHEELREVTIGEELGVSRTPVREALRQLELEGLVTIIPNKGAYVTAITRKDVKDIYKIRSQLEGLCANWATKYITDAQIEELEEVILLSEFHLHKKGSGQIEQMSEMDGKFHKILYEASNSRILEHVLTDFHKYVQLARTMSIEAPERAEKSIEEHREILEAIKAKDAAKAEQLANEHILHVMENLHLEEMAKIKMTTPIVEMDGDEMTRILWKMIKEDLLEPYIELNTEYYDLGLEHRNETDDQVTIDAANATKKYKVAVKCATITPNAARMKEYDLKEMWRSPNGTIRAILDGTVFRAPIVVKGIEPCVKNWKKPITIARHAYGDVYKNTEMKIPGPGKVELVYTAEDGTETRELVHNYAGPGVAQGMHNLCGSIESFARSCFNYALDTKQDLWFATKDTISKKYDHTFKDIFQEIFDKDYAEKFKEAGITYFYTLIDDAVARVMKSEGGYIWACKNYDGDVMSDMVSSAFGSLAMMTSVLVSPDGNYEYEAAHGTVQRHYYKHLKGEETSTNSVATIFAWTGALRKRGEMDGNAELAAFADKLEKATIDTIEEGKMTKDLALITTLENPTVLNSEGFIKAIAEKLKMILACHGIQKSFGEHLIVRDGSFHIEDHEKAALVGPNGAGKSTLLKMIVGESAPDDGNVILTKGKTLGYLAQHQEMQSGNTIYEEVRTAKADIIAMERRIREIEMELKHLSGDALNDRLETYNRLTAAFERENGYSCESEITGVLKGLGFTENDFTKPVDTLSGGQKTRVSLGKLLLTKPDILLLDEPTNHLDLNSIAWLETYLLNYQGAVLIVSHDRYFLNKVVTKVLEIELGELRTYMGNYSDYAAKKQQLRDIRLKEYLNQQQEIKHQEAVIEKLRSFNREKSIKRAESREKMLEKMQTIEKPIEVNTDIHLKLEPSCVSGNDVLTIEHLSKSFPGQELFTDVNLEIKRGEHVAVIGDNGTGKTTLLKILNRVVSADSGTYTLGSNVKIGYYDQEHHVLHMEKTIFDEISDDYPTLTNTEIRNVLAAFLFTGDDVFKQISSLSGGERGRVSLAKLMLSEANFLILDEPTNHLDIASKEILENALNDYTGTVLYVSHDRYFINQTASRILDLVNHTFVNYIGNYDYYLEKKEELTTAYAGEASTPSSVSDNSTDKNVSESKLSWQEQKEAQARLRKRQNELKKTEERIGELEDRDSEIDALMIQEDIFTNSVKCQELAKEKAAIAEELEELYMKWEELAEDAMIGRVKTLEEREISRAVIRRLPRYYRYLGELLENGVERISSNDLSKRMKVTASQIRQDLNNFGGFGQQGYGYNVKYLYTEIGKILGLEEDHNIIIIGAGNLGQALANYAAFENRGFILKGIFDVNPRLQGVSIRGVPIRMMDDLKTFVQNNEIDIAVLTIPKEKAIEVANMLVENGVRAIWNFAHTDLNLPDNVVVENVHLSESLMQLSYNISRYKEDHKMKLLVNAAQMKAADQYTIQELGIASLELMERAANACVQTMQSKNLDLSSVCVVCGSGNNGGDGFAIARILKNMGCSVDTYLVGNPEHCTPETREQIRRLKECGGKITEDIPQDNSYSIVIDAVFGVGLSRKIEGTYRQVIERMNQMQGTKFAVDIPSGLSASTGCVLGCAFHADDTVTFEVKKIGLELAQGRAYAGRVTVAEIGISHEPLLQDADVIHSFEREEYRRMLPERPEDSNKGSYGRLLVIAGSKGMAGAAYLNAHAAYMTGAGLVRIYTPKDNREILQTLLPEAIITAYDEFNKEEVLKLLKWADGVCIGSGIGRSTTSEKLLRTVIEYVDVPCLIDADGLNLLSDNKDLLDRLADRKFIFTPHMKEMSRLTGIPVEDLREDRIQILKKFADGYQVTCVLKDSRTLIADKANEICLNLTGNSAMAKAGSGDVLAGVIAGFMVQEKDTKKAARLGTYVHGLAGDLAKFEKGVYSVMARDLIEYISKALMKLEDEMKHYTRVLARVDLDAVEYNIEMMKKNIQKDTQMMAVIKMDGYGHGAVQIAKLLEPKDYIWGYAVATLDEAILLKDACLKKPVLVLGCIFPDQWDTMIRNEVRMTVYSYEMAKEVSELAEAMGCKVYVHIKLDTGMARLGFQITEENAEEIAKISKLPNLVMEGMFTHFSKSDEADKTFTNEQLDKYLWMKEELKKRGVTFQYYHCSNSAGIIDLKEANMDIVRAGITTYGMYPSDEVEKERVPLKPAMELISHVAHVKWLTEGKPVSYGGTYVTTRPTKVATIPVGYGDGYPRSLSNKGYVLIHGQKAPIIGRVCMDQFMVDVTAIEDVEFGDKVVIFGRDGKEFLSVDTLGELSGRFNYEFVCVLNKRIPREYIRHGEVVEQVDSFMKYILQTDNETIEIPIIRSKRKTLGLEVKYDGTVNARVPMRAPREIIERFIREHEAWITRKRQEWSLAGNNQDDVAGEFGERKKRGANAVDPSKILPPVETKEGKAKIRQYIERQVEYYAKIMGVTYGRISMRNQKTRWGSCSSNGNLNFNNRLLFVPEELVDYVVVHELAHRKEMNHSNAFWNVVEKYMPDYKERRKKLREYHIEMFKVSYFLEVLPIIASKVNITFELTVAATIFALIVGVIIAIIGYYKIPVLYQLTRVYVSIMRGTPVVAQLYFFYYGIALYSAFVRNMTPLIAVAVVMSFNMGAFMSESIRGALLSVDEGQKEAAYSLGMTNFQLVTRIVIPQAVRVALPPLFNDIINLIKMTSLAFMLGVPDIMGAAKIEGARTFRYFEIYAAVMLVYWLIIFVLGILHKLLEKKCANMYMKRRVLAALLVTMMTVGVVAGCGSNAKSDDSDKKTSSDSKSDDKKDSGKKVTVVTSGTGEPYSLISDDGKWTGIDAEMWDEIEKRTGWEVEVKQASFDAMWGELDTGRADVVANCLAVKEERTDKYNATIPYYGDSQCIIVNDDSDYKTSDDLKGKTVGCTNGQAAQTIIEDMAKEKGFTVKLYEDSAVGMNDLKLGRIDAYANTTTNVNAFTHNNTDAKFRFFDEQLLANNVAYFLQKTDDGDKLTKELDDVIQDMLDDGTVAKITEKWMYADMTKLIQKMGTETQLVKVEHLYKEFDENTKVLEDINLTINKNEVIAILGPSGTGKSTLLRCLNYLTVPTKGKITIGDVTVDAQNHTKKDVIELRKHSSMVFQGYNLFKNKTALENVMEALTVVQKKSKAEAEKIALELLDKVGMSERKDFYPSKLSGGQQQRVGIARALAVNPNVVLFDEPTSALDPELVGEVLNTIKSLAEEGTTMILVTHEIGFAREVASRILFMDGGRIAADGRPEEIIDHPENQRLQQFLNFVNRKMSNINDKIRQIAKETEPELIRIRRELHQYPELGIDLPKTHEIISRELHKIPGLKIREHAAGGYGLIAELKGKKEHGKNVLLRADIDALPLEEKVESTYKSRHDGRMHACGHDGHATWLIGAAKILAQLTDEFGGCIRFAFQPGEEVGLGADTMIEEDKVLEDPKMDMAFAAHGWPSVESGKIGIVRRYAFGCVGDFKVRIIGKKGHASWPEQTVDPIAAANEIYQHIPAILTRTVSGTEPKIMSVTYMQAGDVNVRNIIPQDCVFGGTMRAVKREVLEKMKAELEKEIKGICQVYGTSYEADIRIHGGSVKNAPELLNGVKKSVADVLGKENVYIIEEDNLGGENFAEYSCRVPAVYMFIGIKPEEKEAIPGLHSPEYQFDDTVLAGAAAAFANIAIHGCMGELKENMEKLVYVDRRNTNCNKWDGQQKMFGEEGLHAMWVADMDFRVPECVVSALREYVESGVYGYYKIPDAYYQAFIDWEREHHGYEVKKEWIRFSPGVVAGFHWLLQILTEENDAVIVNTPVYYPFLDAVKNNHRNLICSDLKNENGEYSIDFDDFEKKITDHQVKLFILCSPHNPAGRVWKKEELKQLFEICRAHQVYIISDEIHQDLVFGENKHIPSLSTGEYDDIMVSIVAASKTFNIAGAQNSMVIIPDEKLQEKWDAYVKGNRVLGGNAFGYVAAQAAYTGGNEWLTLVLDQIEENYQYLKAELAEKLPEAVVTPLEGTYLCWINLEAYVSADEMKEVIQKKCRLAVDFGDWFGGERFGTFIRMNLATSKENVEIGVNALIANLVRKMYEIEVCYKIIFEAMLEKPVLKSIAEKINEYTGAKVIFVSGTGKILAYSHTCEQDGSESIRWKHVTFSDYKKFCQEADTKEHQLVLQPVETMGRLAGYVVILYSEEESRRFFEELGSVIGQAVRHQFEDVVKETMVLQPMREAILAWSLFHGKADGIQQTEKIWTGQCIEVLMLKKDIQEKNVLWIKEIWDRYCICEETDRIQILFYGLRAKNTEEIYQKIMEKKIGCSISEPFGKLDRCVTKYELLKRMAMVSGLENDPVMKREKEWSVQGLYTYTTPLFKEAGLSDYRLLRLLQEDRENNTDLYYTLKVYLLNENNVTMAADSLHIHRNTLVYRLKQIRECIEADINDNETARELLAFMMMYDVSRQDQKRQKMKLVQNLPEIFEEFGEKKREAFLEIKEYKDKGIPVIGMYCAYFPTELAMAAGAIPVGLCSFSNETITAAERDLPKSMCPLVKSSYGFAISDRCPFFHFADLVIGETTCDGKKKMYELMSEFKPVHVMELPNSQSERGLVFWKSEIIRTKEYLEEFFHIVITEEMIRDAVHLNNEIRMSLKNLCELMKLDPAPVKGEDIQKMVQGSKYRFDFATTPGVVKEVIDKIMTEYRQGKHLEKRPRILVTGCPIGGDSLKVIRAIEDNGGVVVAIENCSGVRTLGNPVEEDCEDIYEAIARKYLSTGCSIMTPNDNRIDLIGEIIDEYHVDGVVEMILTGCHATGAESVYIRKFVTEEKHLPYIAIDTDYSTADQGQIATRLTAFLEMIQPGTDEDLDINYCYKIVLAGMTEQRSRAEILEEIWKYTHIPVCIKSGEQETEEWVGISREEAEQECGKRMEYKLSEKNGVVMAVVPEGVNKESVEELLELLAKSYHMRTHTRETEEREIPDYMWIITEEPKNLIHIGRDLTKQARVNKMLTGLKLRQIQDNELFISGMDGKEARNGIIDVCRKSMEDEDGKIMIGNGFSDWGKKEENRQLQWQVLNMAVRQKQKEQVLLVENYYHELAISCISENLGQENIYLEELEILKEEDRKTGKELYKTLYWYLRMKRNVAQTAARLRIHRNTLLPRIARINELLDLDEKDGMECERILMGMEIEKLKNDMNPTKEFRDYMISQGAALVGIGDLTAVPSSDYPVGIAVAIPLPKHVIKDLQLAPTREYYKLYTTLNDKLNAIVTAGEKYLTGRGYQAYAQTTDRITVDSDNRSPLPHKTVATRAGLGWIGKNCLLVTPQYGSAVRISSLLTDAPLTCDAPVTRSQCGACHACVRYCPAHALKNTLWRSGMPREDIVSVSACYKKQREIMRKSTGIDTDLCGKCFAVCTYTKQYLKQKQMESRMMELMEAIQESEGQAERRVLTLLGGRYISEKALVIDGKIVWESRKNGYFHGYTDEIKNITESGITYIGNEKVFCDTLGQEKQIVICGAGHVSIPVIKMAVMMDCEVIVLEDRPMYADHARMAGASQVICEPFEEALDKIQGSADTYFVILTRGHRYDQICLEKIAAKEHAYIGMIGSRRRTALVKQSLAEKGVDQEVLDAVYTPIGLDIGAQTPAEIGVAIIAEIIEVKNRKKRTYGYSKEIMRALTAQEPYPEKKIMATIITRHGSAPQGLGTKMLIYRDGRCVGTIGGGCMEARVIQIARLMAAGEGEQARICHVDMTGNEAEEEGMVCGGEVDVFLEIVMIEVEVKIPIENIEKIKQKLLETGFIYQKTVVETDTYFTSDHYDMRKKDKALRIRKTENLDTGEVKAQLNCKGPKLDQVSMTRKETEIDIYEPEKMEDILKELEFYPASCRVKKTRCYYIKDHMTAAADKVENLGNFLELEIIVAKEEERAGGLDMIYELMRMLGCEKTETVRDSYLSMLEKRGVMTLKELPIGKSATLTVVGGEGALRQHFLDMGLIPGADVTMVKYAPMGDPVELRIHSYELTLRLADAEKIEITDVRDEIKIKNQIPKEKIDHPGLGEGGKYHEKADENPLPDGTTLTFALAGNQNCGKTTLFNQLTGSNQHVGNFPGVTVDRKDGVIKEHSDTLVTDLPGIYSMSPYSSEEIVTRNFVLNEHPKGIINIVDATNIERNLYLTMQLMELDIPMVLALNMMDEVRDNGGSILVNEMEQELGIPVIPISAAKNEGIGELIEHAVHVAKYQESPGRQDFCDADDHGGAVHRCLHGIMHLIEDHAKKADIPVRFAACKLAEGDELILEQLKLDENEKQLLEHIVKQMEQERGLDRSAAIADMRFTFIEKICDATVVKPKESKEHLRSAKMDKILTGKYTAIPCFVAIMAAVFWLTFNVIGAALSNLLDMGISALTNLVDGALTSWNVNSVIHSLVIDGIFNGVGSVLSFLPVIVTLFFFLSILEDSGYMARVAFVMDKLLRKIGLSGRSIVPMLVGFGCTVPGVMASRTLPSERDRKMTILLTPFMSCSAKLPIYAFFTAAFFPKQGAVVMVALYFGGILMGILMALLLRGTMFKGEAVPFVMELPNYRMPGAKNVGQLLWEKAKDFLQRAFTVIFFATIIIWFLQTFNLHMNVVADSKDSILAVVAGIIAPVFLPLGFGNWKISTALITGFMAKESVVSTLSVLFGSTAELTGAITPVAAASLLVFCLLYTPCVAAIASIKRELGAKWAAYVVLGQCVVAWIAAFIVHLIGTLVMMEQITKVLSRISSVLTKYIGMIIICFSVIAFFWRDGFAWTTNYTSIFLGVAMFGMGLTIHIGDFKVVFTRPKEIIIGFAAQYTIMPLIAWGLSVLLHLPTDIALGVILVGCCPGGTASNVITYIAGGDVALSVGMTITSTLAAPVMTPLLVYLLAGAWVQVSFPGMVISVVKVVLIPVLLGILLRKLIGRHIEKLSGILPLISVVSIVMIISGIVAVNAEKIMTSGFLVLCIVILHNLAGMGLGLLAGRIFHVEYDKATALAIEVGMQNSGLAITLATANFAANPFATLPGAIFSIWHNISGSLFASLRRSGRYKIKEQIAKAEHVIMQVTNTIEKTRELVNNWKKEGKTIGLVPTMGYLHEGHASLIRRCREENDIVVVSDFVNPTQFGPNEDLEAYPRDFDRDSALCESIGADLIFCPSPAEMYHDPHAFVSIDTLSDTLCGKTRPIHFKGVCTVVSKLFNIVKPNRAYFGQKDAQQLAIIRKMVLDLNFDIQIVGCPIVREEDGLAKSSRNTYLSCEERKAALCLSKAVKKGQELIRNGIAASEVLEPMCEIINGEPLAHIDYVSMVDALSMQPVDSVNADVLVAMAVYIGKTRLIDNFSYEVMTLELLKGKIHRATVVQAELDYVGSITVDEALLEAAGILEYEKVQIVDVNNGSRFETYTISGQRGSGMICLNGAAARCVSTGDKIIIMAYGQYTPDEAKEHKPAVVFVDEENKVNRVTNYERHGLLKDMEMDYIGIDIGSTASKVVVKGDHDIHFVLPTGWSSKETCQTIKDRLLEDSVDVLSDDSKVVATGYGRVAVDFADHVITEITCHARGGREMAGDECAIIDVGGQDTKIILVSGGMVQDFQMNDKCSAGTGKFLEIMANRLGVTLQELFDMADKGTVLPISSLCTVFAESEVINYIGEGQKREDIAAGVVDSVANKVAQLAMKKNLPDKVILTGGLSNSTYFTKILSQKLGQTVSPTEHGRYAGALGAALLAKEKKKRMQKIQHYVLFPNHDNGMRLYGILKEAGIKTTIAPTPRVASKCCGISLLVREEDLDTIQKCIDENQIEILKIAAIERDINPKRDKYCMADYRKMWEELGMDVELHDQLCAVLPQAFGDVFLSQENRPDSMDYYNMVVADIHGIRPAELIEHQKKGGKVFGTFCVYVPDEIVFAADAIATGLCGGSQFWVPGGEKVLPANTCPLIKASVGARLDRTCPFFRIADMFIGETTCDGKKKAWEILAKDVPLHVMDLPQMKRAKDIKAWAEEIETFKNVVEEFTGNVVTAEKLAESIKLINNKRKALERLYNLRKNENLPISGCDVLLISQIAFYDDPARFTQMTNKLCDELDQRVKDGVSVVPAGTKRIMLTGTPLAIPNWKLHNIVETSGAAIVCEEMCTGTRYFENLVDESKTTLEDQYMALAERYMKINCACFTPNEGRIDDILRLAKEYKVDGIIDVNLKFCNLYDTEGYFVEKALKKSGIPVLGIETDYTDSDAGQLRTRISAFIEMLDNKMEQNIYFDNGSTSWPKAPGVAASMTKLLESGAFNINRGNYEGAYELENQVLKTRMQLARFFHAPDSRCVVFTPGITYSLNCLLKGFLKPGDHVLVSSLEHNAVMRPLCQLASQDIHYTMIPAETDGTTHPESIEALIRPETKAVIMLHASNVCGTILPIREIGEICRRRHLFFAVDTAQSAGSVDIDMQKYNIDFLAFTGHKGLLGPQGIGGFLISEALDQELTPLIAGGTGSQSDSLLMPDYLPDKYESGTLNLPGIIGLHAALTYLDETGISAIHQKKMALTGHFLEKIREIPQAHIVGRQTLQDRLAVVSLDFPDYDNAEIAFALEQDYGIMTRVGLHCAPMAHQTLHTMPQGTIRFAFSHFNTIEEIDQCIAGFRELFSVMELIKELPEVFEEFAEQRQKSFLAMKGLKDQGVPVVGAYCTYFPAEIARAMGAVTVGLCSVSDETIPDAEKDLPKNLCPLIKSSYGFAKTDKCPFFYFSDVVVGETTCDGKKKMYEYMSDFKDVFVMELPNTQSEMALKLWKSELIRFKEYLEKKFDVEITDEAVLEAVKEENKVRKVMKDLYHVMALDPAPIKGGDLFKVLYGSGFKFDRKAIPAEIEAMREKIEKEYEEGKRLDKMPRILITGCPIGGATEKVIRAVEDNGGVVVAFENCNGAKSFDKLVDEENPDVYDALARRYLNIGCSVMTPNPNRLDLLDRLIDEFKVDGVVEMTLQACHTYNVESLAIRKFVNEKKGIPYINVETDYSQADIGQLNTRIAAFIEMLREKWEENPVNVQYDENGNKKEKYYCLDMFPYPSGNGLHVGHWRGYVISDVWSRYKLQQGYYIIHPMGWDAFGLPAENYAIKMGVHPEISTAANIKNIKRQINEIAALYDWDREVNTTDPNFYKWTQWIFVKMFKEGLAYEKEFPINWCPSCKTGLANEEVVGGKCERCGAEVTKKNLRQWMLKITKYADRLLNDLDKLDWPEKVKKMQADWIGKSYGAEVDFPVEGRDEKITVYTTRPDTLYGATFMVLAPEHELAKSLANDETREAVEQYIYDASMKSNVDRMQDKEKTGVFTGSYAINPINGAKVPIWLSDYVLADYGTGAIMCVPAHDDRDFEFATKFNIPIIQVIAKDGKEIENMTEAYTDAVGTMINSGEWNGQESSVLKKEAPHIIEERGIGRATVNFKLRDWVFSRQRYWGEPIPIVHCPKCGNVPVPEEELPLRLPEVESYEPTGTGESPLAAIDEWVNCKCPQCGADAKRETNTMPQWAGSSWYFLRYVDNHNDKELVSREKADEMLPVDMYIGGVEHAVLHLLYSRFYTKFLYDIGVVDFDEPFHKLFNQGMITGKNGIKMSKSKGNVVSPDDLVRDYGCDSLRMYELFVGPPELDAEWDDRGIDGVNRFLKRVWNLVMDSKDADITATKEMIKERHKLVYDVTTRLESFSLNTVISAFMEHNNKLLEIAKKEGGIDKETLSTMAVLLSPFAPHVAEELWEELGHTESVFKAGWPKYDENAMKDDEIKVPVQINGKTKAVIEISADASKEEALAAGKEAIADKLTGNVIKEIYVPKKIINIVMKMLLYQEKRKKSRGPSKTIRFRNTDIRTVFEIIQMIYERDYKKTNAFIVWRKRIDTELALVEYVMNITVYLGANEGNDPFFKEAVRELGAWIGTNGNTLVYGGSKSGLMGELAESVLQAGGKVIGVEPQFFIDAGFVYDEITELITTKDMSERKAKMIELGDAFIAFPGGTGTLEEITEVMSKVSLKHLDAPCILYNLNGYYDSLKQLLEHMIEMDLSSREKQEGIYFAENLEKIQKCLAKMNFDQMKLKLLGEVTLNYGKFISTVINFLNTYKGYNSAVEFSIIGMLREINLDEISDGRLYSSNDMAKTDCKGCDGCSACCHGMGNSIVLDPLDVYRLSTNLSKSVNELLTGPLELNVVDGIILPNLKMARAEEACSFLDTNGRCTVHAFRPGICRMFPLGRFYENRSFQYFLQIHECPKTDRSKVKIKKWLDTPNLKTYEKYIADWHFFLKDLQEYVMNLAFDSSANSDGTARTISMHVLTQFYLTPYPEDGDFYSEFYKRLEKSRLFTQSIGIMKFFHLSDLHIGKQLHRYNLKEDQQVILKEVITYAKELRPDAIVIAGDIYDKSVPSAEAVNVFDEFLTDLSEITPEIPILIISGNHDSPDRLKYASEILKRHHIYLAGNVPERPEEHIEKVTLHDAYGEVDFYLLPFMKPAYVKNIFVDGTPETYSDAVKEIIKREKIDYKDKRNVLVSHQFYVGEKAESPETCDSEVFSVGGIDNVDIGSVKEFDYVALGHLHGAQCIGKPEIRYCGTLLKYSVSESTQNKSLTVVTLKAKGEKPEIENYPLHPLRDVRKKKGTLDEIIKEAQETEKDDYISITLTDEIDPYKPKEQLERIFSHILEIRVDNQRTRTKLKEMDEELVMKDPFTSFAEFYKEMQGREMNGEEETIMKEIFDKAKGVEMRPVKLIMSAFGSYAGKTEIDFTEIPNGLFLITGDTGAGKTTVFDAITYALYDRTSGGTRDGNMMRSQYAGEETSTYVEYTFLYQKKEYKIRRNPEYLRLGKRRYADGSPRYVKETPKVELTLPDGSIFKGKKRETDQKISEIIGLDADQFTQISMIAQGEFLKLLLAESRERKKIFSRIFQTRFYYRIQEELKKQAVQLYVKLEQNLQEMKLEMARVEYPSYKKDGGVWPEEVQLEKCTEENELIKQWKVIAGQDIPDRERISVILKEIIDQGNRWEKVCKKESSRAQMVLEDKNRLLKEAELLNQLFDSYERVLSRLEEKMPEKAKYEFLTGRIQTGKKAGRVLQEEKRYLEEEKRLTKLEVQERSLQKELQECRKQLQELTDKQKEAGREKTEKETVLTEKKVRIQDAILQYQSMNAKKEELDKITKEIKNYLNQSETILQKKEILQNNRKEILTFLKKYEKIETCINECRNQKEHIEEQIRHYEELDHQEERKEELKEDCERAKKEADREQKNYENAWAEYEMKYHKFLNEQAGILALNLEDGQPCPVCGSREHPQIAALSDEAPTQAEVELAKAERDKKEKIRDIKTEAFRKCLAGYQAAQEICLTLRKNIKDEVEDITGIGWKEKIQSLKRTLMETEKRLKQLEEIFERCRTLKENQEQIANQIEKLEEKERKTSQSLTESKLMYTKLEAEYQAMEEKLPYKTMEEAEEHLREITGKLELVRNNYETVTRCLTEKQNKEKELEGQQKTVSASVVQSQEEVQKKIRSYKQIIKEQGFEDEESYHSQCMTERELEEAEQWIEAYQKELQELEANRTLLEQQLEGKERKDTEQIAREIKEASGELEEIRKEYMKLHNTNERNREIRDNLKRNFEKNSGLQKQYEIVGNLSKTANGNLSGSAKLDFETYIQRQYFRQIIRAANKRLVRMTSGEFILQCRDVEKLGSQGQAGLDLDVYHMATDTVRDVKTLSGGESFMAALSMALGLSDIVQNTAGAIHLDTMFIDEGFGSLDDVSRDQAIRVLNDLADKDRLIGIISHVNELKEQIDHKLVVKKNEKGSSVSWSLMAVKYVFVTGGVVSGLGKGITAASLGRLLKARGYTVTMQKFDPYINIDPGTMNPVQHGEVFVTDDGAETDLDLGHYERFIDESLSKNSNVTTGKIYWSVLQKERRGDFGGGTVQVIPHITNEIKSRFYRNPAAENTEIAIIEVGGTVGDIESQPFLEAIRQFQHEKGHENVILIHVTLIPYLKASQEMKTKPTQASVKDLQGMGIQPDILVCRSEYPLGVGIKDKIALFCNVPANHVLQNLDVEYLYEAPLAMEKENLAGVVCECLHLDCPEPDLKDWTEMVDYLKNPNTEVTVALVGKYIQLHDAYISVVEALKHGGIFSRATVNIKWIDSETVTADNVDELLGDVSGILVPGGFGTRGIDGKLEAIKYARTHNVPFLGLCLGMQLSIVEFARDVLGYNDAHSAELDPNTTHPVIHIMPEQIGIEDIGGTLRLGAYPCVLDKTSKAYEMYGTEQISERHRHRYEVNNDYRDALTSHGMKLSGLSPDGRIVEMIEIPEHPWFVATQAHPELKSRPNRPHPLFRGFIEAALKYQNDHKMKIGFDNEKYLKMQSEHIRERIGQFDNKLYLEFGGKLFDDYHASRVLPGFQPDSKLCMLRELSDQAEIVIVISAEDIEKNKIRGDLGITYDSDVLRLMQIYQGLGLYVGSVVITKYNAQESAELFKNRLEKLGIKVYRHYLIPGYPTNVPFIVSDDGYGKNDYIKTSRPLVVVTAPGPGSGKMAVCLSQLYHEHKHGIKAGYAKFETFPIWNIPLKHPVNLAYEAATADLNDINMIDPFHLEAYGETTINYNRDVEIFPVLNAMFQRIYGESPYKSPTDMGVNMAGNCICDDDACQEASRQEIIRRYYASRRRLLLGACSEEETYKLEMLMNQANITVHDRPVVDAALTEAERTNGPAAALELPDGSIVTGKTSDLLGACSALLLNALKELAGIEHEIKIISPQAIEPIQSLKTKYLGSRNPRLHTDEVLIALSVSAATSKDARLAMDQLPKLKGCQVHVSVMPGSVDIKQFKRLSIQATFEAKYEKNSVFFNNKGVMCCSILEMKMLMPLPAHFSFHFYTKYDGRSAYSSFTASKIKMDNQNNKNNKNNKQGISFILLVTVITSILVIALFQFQGMTSAKEITYNKFLKMVDDGEVRKVQIQSDKIMIVTKKDKDSGVAQEYYTGVVNDDDLTKRLEKAGVEFKQEIPDTTSAVAMNVILTFLPIAFFVGMIIWMTKRMSKGGGMMGIGKSNAKMYVEKQTGVTFKDVAGQDEAKESLQEVVDFLHNPGKYTSVGAKLPKGALLVGPPGTGKTLLAKAVAGEAKVPFFSLSGSAFVEMYVGVGASRVRDLFKQAQQMAPCIIFIDEIDAIGKSRDNQMGGNDEREQTLNQLLAEMDGFESNKGLVLLAATNRPEILDPALLRPGRFDRRIIVEKPDLKGRVEVLKVHSKDVKMDETVNLEEIALATSGAVGSDLANMINEAAINAVKHGRNAVCQSDLFEAVEVVLVGKEKKDRIMSQEERRIVSYHEVGHALVSALQKDAEPVQKITIVPRTMGALGYVMQTPEEEKFLNTKKELQAMLVGLLAGRAAEEVVFDTVTTGASNDIEKATSVARAMITQYGMSEKFGLIGLESIQNRYLDGRPVSNCGQQTASEIDEEVMKMLKDAYEEAKQLLRNHRQALDKIAAFLIEKETITGKEFMEIFHEVEGIDPDAPKKEEARIGMNPVEGEGFVMKPADDIDDAHNADVQEKSEKTEEKTVGTATESVHEEMKGRLFGVGVGPGDPELMTYKAVRTIEKCPVIAVPAKGREHAVSYRIAAGMVDNMEEKEYLDLDTPMTKDRQILNQNYEKAAKRIIEELEKEKDVAYLTLGDPTIYSTYMYIQRIIKEKGYETSIINGIPSFCAAASKLNESLADRADELHVIPSSYDIRNALRYPGTKVLMKSASRLAEVREILEEKNVDVKMIENCGMADEQIYERLEDIPEHASYYSLLIVKESVMENFNIQEELKKLPGKPGVYLMHDEKDAIIYVGKAISLKNRVRQYFQSSRNKGAKIEQMVTHISRFEYIVTDSELEALVLECNLIKEHRPKYNTMLMDDKTYPFIKVTVNEPFPRVMMARRMKKDKAKYFGPYTSAGAVKDTIELIRKLYHIRSCNRSLPKDIGKERPCLNYHIHQCYAPCQGYISREEYRKSIDEVVRFLNGNYDPILKELEEKMLDASENLEFEKAIEYRELLASVQKIAQKQKITDTAGDDRDIIAMASEGEDAVVQVFFIRGGRLIGRDHFYLKIAENDTKSEILSSFIKQFYAGTPYIPAELMLPEEIEDQEIIEEWLTTRREHKVRLRIPKKGTKEKLVELAQKNAQMVLKNDKERLKREEGRTIGAVKELEKILGLTGIIRMEAYDISNTNGFDSVGSMVVYEHGKPKRNDYRKFKIKSVQGPDDYASMNEVLTRRFEHGLRERQDESETGGFQAFPDLIMMDGGRGQVNIALEVLEKLNLHIPVCGMVKDDNHRTRGLYFNNVELPIDRNSECFRLITRIQDEAHRFAITFHRQLRSKGQVHSILDDIPGVGPARRKDLMRSFENIEAIRNATVDDLKELPSMNEKSAQEVYKFFHQDTMANKVKLKTLVEKMNLKNLTPDVDLSEKEVEIPDINRPALQLTGFFEHFDSERVQIIGYVEYTFLEKMTDEVKKKKIYETLLSYKIPCLIFCRNLPPEAMLLEMAEKANIPVFQTEKKTSEFTAEIIRWLNVELAPCISIHGVLVDVYGVGVLIMGESGIGKSEAALELIKRGHRLVSDDVVEIRRVSDETLVGTAPDITRHFIELRGIGIVDVKALFGVLSVRETQNIDLVITLEEWNKNKEYDRLGLEEEYTEFLGNKVVCHHLPIRPGRNLAIIVETAAVNHRQKQMGYNAAQELYKRVQQNLIKKMKYCFGVDIGGTTVKLGLFTTEGEIVDKWEIKTRTENQGEAVLPDIAAALNEKLEEKQIPKDEVEGIGVGVPAPVDSEGVVQNTANLGWGYKEVKREMEELSGMKAEIGNDANVAALGEMWLGAGKGRKNIIMVTLGTGVGGGIIIDGKPLVGAHGAGGEIGHLCVNYEETDHCGCGNTGCLEQYASATGITRLANIRLAKDDKASVLRGQEVSAKTVFDAVKADDEVAKEIAEEFGKYLGHAMANLAAVADPSAIVIGGGVSKAGEVLLQYVEKNFKEKAFFANKDTEFVLATLGNDAGICGAAKLILMNYGKKKAAKRQKKITSKSTMQGKRIVVRLFKALLICIVLAAVVGMAGGGLFIKKIIDDTPHVSTSDVKPKGFTTFVYADDGSTEIERFVSSGSNRVYKSIDEIPKNLQHAFVAIEDERFYKHNGIDLQGIARAAVVGIARGGFSEGASTLTQQLIKNNVFPNFTKEKNFYDKLQRKIQEQYLAVQIEKQMSKNEIMESYLNTINLGQNCLGVQSASQRYFGKDVSDLTLSECAVIAGITQNPTDYDPVTRPENNKIRRNKVLKNMLEQGYISQKQYDKAMSDDVYARIQATSASSQADNAYSYFVDALAQQVIQDLKDQLGYTDTQAYNAVYSGGLSIYSTQNQEMQKICDEEANNDANYPGLKEYGLDYALTVTRADGSVENYGSNNIKNYVEKTYGNDQGLLYSSEDAAKAMVAEWKSTIAQEGDTYDERITITPQPQSSITIMDQKTGQIKAMVGGRGEKASSLGLNRAYQGSKRQPGSTFKILAAYAPALDSCDKTLATTIDDEPYTLKNGNVLRNANKQYGGTTTLRNGIKKSINVVAVKLSDEITQELGYEYCEKFGISTLVKDKTINGKVFDDSTSQTLALGGITEGVYNYEMCAAYASIANGGVYNKPTLYSKVVDHDGNVLLDGTGESHTVIKDSTAYLLTSAMEDVVNSGTGTACQLPNMPVAGKTGTTTSNKDLWFCGFTPYYTCAVWGGYDDNKECDYDTSFRFRLWKGIMSRIHENLESKDFKVPTSVEKKSICTITGKLATNGCPSITEYFAKDTLPSETCSGHGYSSGRKYKSSTEDNDTTEDASSYSNNTGNSYNNNTGTTSDNTGGNTGGSTGGNTGGSTGGNTGGSTSGNTGGGSTGGNTGGGSTGGNTGGGSTGGNTGGSTGGDTSQMLPEYRTIYRGGEDEIIEKKSRFIATVVPVNTEEEALEFVEKTRKKYWDARHNCFAYIIGERGQLQRCSDDGEPNGTAGKPMLDVLLGNELRNVAVVVTRYFGGTLLGTGGLVRAYSGAVKAGLDASVIITKILGVKLHIETDYTTFGKIQYILAQRELKILDTVYTDKVELEVLIPKTDVAQVMHAITEGTNAQAEMTAGEECYYAEIDGVPTILEENIIMKFIIIGKNIDVTPGLREAVESKLGKLGRYFTPNTEIHVTLSVQKGHQKIEVTIPVKGGLVRSEQESSDMYVSIDLVEEVIERQLRKYKNKLVAREQEGGNFKQEFFDAEDNIEDDGEIKIVRTKKFGFKPMYPEDACVQMELLGHDFYVFCNAESDEVNVVYRRKNGTFGLIEPEFSMKELISHLLKQVAAILEYVIAFMLAIGIILLCLRMVCSLQYIPNLNTYPNYDDLLEVCFNLIIGVELIRMMYSHSPSTVFEVLLFAIARHIIMDHTSIYSSLIGVCSIAVLFATRKFLFSEFDIADETVFRASTKAKVVNKILSVNIPHEADDTLSNVLLRHLEEQNITPRVGACYYFHDCGLRVAKLHDGKISRIQVIRAIHMCAADENKKAAENKIYKLSGFREQKLFYIFYFLPLSCGQLMKTKREDVRNIAIIAHVDHGKTTLVDELLKQSGVFRENQEVAERVMDSNDIERERGITILSKNTAVTYNGVKINIIDTPGHADFGGEVERVLKMVNGVILVVDAFEGAMPQTKFVLRKAMELKLPVIVCINKIDRPEARAEEVIDEVLELLIDLGASDEQLDCPFVYASAKNGVAALEISDEMKDMKPLFETILDYIPAPEGDPEAPTQVLISTIDYNEYVGRIGVGKVDNGTIAVNQDMVVVNHHDPDKQKKVKISKLYEFDGLQKVEVKEASIGAIVAISGISDISIGDTLCSPENPTPIPFQKISEPTISMDFVVNDSPFAGQEGKYVTSRHLRDRLMRELNTDVSLRVEDTENMDAFKVSGRGELHLSVLIENMRREGYEFAVSKAEVLYHKDENGKLLEPMEIAYIDVPDEYTGVVIDKLSQRKGELQTMGAANGGYTRLEFRIPSRGLIGYRGDFLTDTKGNGIMNTAFDGYAPYKGDIQYRKQGSLIAYETGESVTYGLYSAQERGTLFIGAGEKVYSGMVIGENAKTDDIEVNVCKTKHLTNTRSSSADDALRLTPPTVLSLEQAIDFIDTDELLEVTPESLRIRKKILDPKMRKRVNRMSDKMIENNQVTVMGEIVTPFSFSHEVFGEGFYMVEVDVKRLSNSKDRIPLMISERLIDVTKDYTGEFIMVNGQFRSYNRHEEMKNRLILSVFVREITFVEEELDGAKTNQIFLDGYICKQPVYRKTPLGREIADLLLAVNRPYGKSDYIPCICWGRNARFASAFEVGEHVQVMGRIQSREYMKKITETESQKRVAYEVSVSKLECMDEMAIFTGAGVAIVTPFNEDGSINYDRLDELIEFHCEHKTDSIVICGTTGESATMTEEEHMQCVKFTIDRVNKRVPVIAGTGSNCTRTAIDMSKEASEYGADGLLLVTPYYNKATQNGLIGHFSAVAKEVTAPIIMYSVASRTGCNIEPATAAKLVKEVDNIVGIKEASGNISQVAKIMNLTDGNIDVYSGNDDQIVPVLSLGGKGVISVLSNVAPDEAHDICEKYFNGDVKGSAALQLKALPLIEQLFCEVNPIPVKKAMQLMGVDCGPLRMPLTEISPEHEKNLAQAMKDFGIQLAMVKAIMHGCNGHMGRVITDIIKNTEGIELVAGVDKYTKVPNDYPVFESIDACDVEADVIIDFSNAAAADELLDYCVEKQVPVVLCTTGLSEEQLEKVEESAKKVAVLKSANMSLGINLLMKILKDATKVLSPAGYDIELVEKHHNQKLDAPSGTALALADSINEAADNQYHYVYDRSQVRQKRDQKEIGISAVRGGTIVGDHEVIFAGQDEVIEFKHTAYSKAVFGKGAVEAAKFLAWKPAGRYDMSDVIQLMRQLEERYLERLSQLYPTIAKASTEIINLQAILNLPKGTEHFLTDIHGEYEAFAHVLKNGSGSVRRKIDDVFGNTMSSRDKQTLATLIYYPKEKMDRIKKTEKNMEDWYKITLYRLIEVCKRTASKYTRSKVRKALPPDFAYVIEELITEKNDMTDKESYYNAIVSTIIRIGRAEKFIIAMSELIQRLTVDHLHIVGDIYDRGPGPHIIMDELMAYHSVDIQWGNHDVLWMGAAAGQRGCIANVIRICARYGNLDILEEGYGINLLPLATFAMNTYKDDPCECFKLKGNPDYNATEMLMDVKMHKAISVIQFKVESQIIKKNPGFKLEKRNLLHHINYEKGTIELEGKEYKLLDKNFPTIDPKKPYALTKEEEDIMERLERAFENCEKLQRHMHFLLNKGGLYKVYNGNLLYHGCVPLKEDGNLKSVRIFGRAYKGKGLYEVLESYVRKGFYAMDPKEKERGKDIMWYIWLSENSPLFGKDKMATFERYFLAEKETHKEKKNPYYLLLEDEKVVEKILKEFGLENEDAHIINGHVPVKCKDGENPVKCGGKVLVIDGGFSKAYQKETGIAGYTLIYNSYGLILAAHKPFESTEAAIEKESDIHSDSTVVKRTLERKKVEDTDVGKELKEQISDLEVLLAAYRSGVIAERMMKQLKKFMLVFMCTGIMMGLTACGNNTDDNAANDNSATEGTTGTDDTVKDDVTDRNNENDGVMDEIGDDVQDGVDDIEDDIDPNDRKNETDQNNDGTTDQNRDNTNKNDTKNAKMKFRPCIDIHNGKVKQIVGGSLLDQGDQAVENFAADQEADYFANLYKKDGLKGGHVILLNPSTSEYYPETKRQALKALQTYQDGLQIGGGITAENAEEYMKAGASHVIVTSYVFKNGEIYWDNLQNLCDAVGKEHVVLDLSCRKKDEKYYIVTDRWQTFTNVELNTDILEKLSGYCDEFLVHGVDVEGKASGIEEELIKILEQAEIPVTYAGGIGSLDDLERIRKIGNGKIDFTIGSALDLFGGKIPYDVIKNYRMNIIQKIFGTHSQNELKRVYPIADAVMALDEDMQKLSDEELKAKTKEFKERLENGETLDDILPEAYAVVREAASRVLGMKHYRVQIVGGIILHQGRIAEMRTGEGKTLVATLPSYLNALEGKGVHVVTVNDYLAKRDAEWMGQVHEFLGLTVGVVLNSMDNDERRAAYECDITYVTNNELGFDYLRDNMVIYKEQLVQRGLNYALIDEVDSVLIDEARTPLIISGQSEKSTKLYEACDILARQLERGEASGEFTKMNAIMGEDIEETGDFIVNEKEKNINLTEDGVKKVEKFFHIENLADSENLEIQHNIILALRAHNLMFRDKDYVVKDDEVLIVDEFTGRIMPGRRYSDGLHQAIEAKEHVKVKRESKTLATITFQNLFNKYAKKSGMTGTALTEEKEFREIYGMDVIEIPTNLPVQRKDLEDAVYKTQKEKFRAVCDAIEEAHAKHQPVLVGTITIDNSELLSGMLKRRGIKHNVLNAKFHELEAEIVAQAGVHDAVTIATNMAGRGTDIKLDDEARAAGGLKIIGTERHESRRIDNQLRGRSGRQGDPGESRFYISLEDDLMRLFGSERLMNVFNALGVEDGEQIEHKMLSSAIEKAQEKIESNNFGIRKNLLEYDQVMNEQREIIYEERRHVLDGDNMRDSIFHMMNDYIENVVDMVVSPDQDYDEWNLTELNLTIRNTIPMETITEEDVKDISQKELKHMLKERAAKVYEAKESEFPEPEHMREIERVVLLKVIDAKWMDHIDDMDQLRQGIGLQAYGQRDPKVEYKMIGYEMFDEMTRSIEEDTVRTILHVKLEQKVEREQVAKVTGTNKDDTGVREPKKRAEKKVYPNDPCPCGSGKKYKQCCGRKNMKELKNLKELVETIHGLYTSYEDINLLIEMGYEDEDPAMVKELEEEIHTFEKVFEKLKIQTLLSGEYDACNAIMTIHAGAGGTESCDWAGMLYRMYCRWAERKGFSLQVLDFLDGDIAGIKAVTFEVKGENAYGYLKSEKGVHRLVRISPFNSAGKRQTSFASCDVLPDLEDDIDIEIDEDDLKIDTYRASGAGGQHVNKTSSAIRITHLPTGIVVQCQNERSQHHNKEKAMQMLKAKLQLMKEQEQAEKVSDIRGEVKDIGFGNQIRSYVMQPYTLVKDHRTNEENSNVNAVMDGDIDSFINAYLKKIANGMINIAVMGYGTVGSGVVEVINTNGARINQRIGDELNIKYVLDMKDFPGDPVQEKIVHDFETIVSDEDVQIVVEVMGGIEPAYTFVKRCLQAGKSVATSNKALVAKHGAELLSIAAEHDINFLFEASVGGGIPIIRPLNSSLTADEIEEITGILNGTTNYMLSKMFYEGADYDTVLKEAQANGYAERNPEADVEGYDACRKIAILSSLISGQQVDFEDIYCEGITKITVEDMKYAKAMGTTIKLLASSRRYAGNRLHAIVAPCMLYPEHPLYNVNDVFNAIFVHGNVLGDAMFYGSGAGKLPTASAVVADVVDEAKHLNRNIMTMWKEEKLQLEDKADSKRRFFVRIKGKEEELVPQLKESYGEIEVVKVPELEGEFGFVTPVMMEGDYETRSKLYKEQIVHMIRIQDMLIVKKFGGSSVANKERIFNVAKRCIEDYRAGHDVVVVLSAMGDTTDDLIALANTINPNAKKRELDMLLTTGEQVSVSLMAMAMQALDVPAVSLNAFQVMMHSTSRYGNARFKRVDTERIMHELDSRKIVIVTGFQGVNKYDDITTLGRGGSDTTAVALAAVLHADKCEIYTDVDGVFTADPRVVKTAKKLDAVTYDEMLELASLGAKVLHNRSVEMAKKYNVELVVRSSLNRSEGTVVKEGANMEKLLVTGVAADKDTVRISVIGLEDKPGTAFAVFNTLAANNINVDIILQSVGREGTKDISFTVASDDLEHAIEVLNANKERLTIQDITWNEKVAKLSIVGAGMMSNPGVAAKMFESLYNSRVNINMISTSEIRITVLVPEEDIEKAMNAVHDGFGLGAMANIQLAKNLLYLRTLYNLKQDDIANLFNITRQACSNYEKSTRTPDLDVLASFAAYFHVTLDQLILHDLKAEGFTADSDPSSVMMESKTPYMQGIEKNTGNYIYLTEEELNLILAFRSSSDEQRKIVTGFLNSDKMEIERKYLVLHLPGPLESYPCRILEQGYLNTSPVVRIRRDNDRYELTYKSAGLMSRQEYNLPLDDKSYEHLLTKIDGRLIKKKRYMIPLSSALTAELDIFEGDLAPLMLVEVEFDTEDAANSFSPPDWFGEDVTFSGKYHNSYLNTLMKKVCVLLADGFEEIEGLTVVDLLRRAKIYVDTVSIMDDYIVHGAHGINVQTEDLFDEVDFEEFDMVVLPGGMPGTLNLKEHDGVRYVVKQYAKEGRFVGAICAAPTILKSLGLLEGRRATCYPGVEDEMENVILTETAVVVDDNIITSQGVGTAIDFALKLIEVLDGEEKAKEIAESIVFMSLQVEKLENNMAKLTIEVPANDLEKALQSAYMKQKNKIAMPGFRKGKVPRQMIEKMYGPEIFYDDAANALIPKAYSEAYDECDLEIVSRPEINIVQIEKGKSFIFTADVATKPEVKLGEYKGLEVDKVSTRVTQKEVDAKIQEEAEKNAREVVVTDRPVADGDEVILDFEGFVDGEAFEGGKGENYPLTIGSGSFIPGFEEQLVGAEAEKEVEVKVTFPEDYHAEELKGKEAVFKCTVHEIKAKELPEIDDEFAAEVSEFDTLEEYKADVKAKIKEQKAADGKRNQEDQAVEQAVKNAEYEIPQPMIDTQTTQMVEDFAQRIQSQGITLEQYFQFTGLTAEKMMEDMKPQAIKRIETRLVLEAIAKAENIEITDEKVDEELAKMAESYKMEVEKLKEFMGENEKKQMKEDLAVQEAVTFLVENAVEKMSLVPYVIEQTSRGERSYDIYSRLLKDRIIFLGEEVTDVSASVIVAQLLFLEAEDPEKDIHLYINSPGGSVTAGMAIYDTMQYIKCDIETICIGMAASMGSFLLTGGTKGKRLALPNSEIMIHQPLGGAQGQATEIQIAADHILKTRQKLNQILAENTGQPLEVINADTERDNFMTAEEAKAYGLIDEVIKSRMVGKNDDQVRCSFCNKTQNQVRKLIAGPNGAYICDECVDVCAEIIEEEFEYENGREWNPFSDINLLKPEEIKAFLDEYVIGQDEAKKVLSVAVYNHYKRVMSGKELGVELGKSNILMLGPTGCGKTLLAQTLAKILGVPFAIADATALTEAGYVGEDVENILLKIIQAADGDIERAEYGIIYIDEIDKITRKSENPSITRDVSGEGVQQALLKIIEGTVANVPPQGGRKHPHQEMIQIDTTNILFICGGAFEGIEKIVEKRIDQKSIGFNAEIAEKHEDDVDRLLQQILPQDLVKFGLIPELVGRVPVTVALEMLDKDALVKILTEPKNALTKQYQKMLELDGVKLTFDKKALETIAETSLKRKTGARGLRAIMENIMMDVMYKAPSDETLKTCRITEDVVKGTGEPVCEHAEPDSESAMTGETYSLPMVALRGLTILPEEVRHFDVSREKSLLAIEEAVKNGQKLFVSAQKDLETEEPGAEDVYLVGCVVTIRQVVKLPKKMSRVLVSGEARASLVRLDSETPYLQATVVELPDDEDVSEEQTAENPMNLEAMIRGLQDVFKEYLLKNPKLSKELGMQVEAIRDLKHLVDVIAANMPFAFEDAQELLEETNLMRRYELLIYKIVNEIQAQKVKEEIQSKVKERVDKNQREYILREELKVIREELGDDNTMSDADEFQQAVDALKASKEVKEKLNKEIKRFRNSMNSPAEVGVIRTYIETMLEMPWDKTCKEHKDIAFARQVLDEDHYGLEKVKERVLEYLAVRALTKKGEAPIICLVGPPGTGKTSIAKSLSRALKKPYVRISLGGVRDEAEIRGHRKTYVGAMPGRIANGIKQAGVKNPLMLLDEIDKVSNDYKGDTFSALLEVLDGEQNNKFVDHYLEVPIDLSEVLFITTANSLQTIPRPLLDRMEVIEVTSYTENEKLHIAQEHLIPKQIEKHGLKADQVTISKNAIWKMARNYTKEAGVRQLERKIGDICRKVAMEILEKKKTSTHVTERNLEHYLGKELYSYQMANEEDEVGIVRGLAWTSVGGDTLQIEVNVMPGEGEILLTGQLGDVMKESARTGISYIRSVSKEHDIADDFFKKHDIHIHIPEGAVPKDGPSAGITMATAIMSAVTGRKVRADLAMTGEITLRGRVLPIGGLKEKLLAAKNAGMKTVLVPAKNERDVEEISTEITKGLEIKFVTHMDEVLKEALVMIIRNINLETVCGITSKLPENTLPEIAFAGKSNVGKSSLINALMNRKSYARISATPGKTQTINFYNINEELYLVDLPGYGYAKVSEQEKIKWGQLIERYLHGSKQLKVVFLLIDIRHKPSGNDKMMYEWIVSQGFNPVIIATKLDKIKRSQKDKQIKIVKEGLGVLPGTVVIPFSSVTKQGRDEIWELVESQFLNVMDLITNIQKYSIHDGDGIRTTVFFKGCPLKCVWCHNPETQRFEQEIQYDREKCTGCGACAQVCPNHAITMEEGRPKLDKKLCTLCGKCENFCTQGIREIVGQKYPVKALVKELMKDLMFYEQSGGGVTLSGGEVMAMSTDYILEIAKALKKEEVSLTIDTCGYVPYEKFEAILPYVNTFLYDVKVMNPELHKQYIGVDNKLILDNLVKLSDAGARIYIRIPTVKEVNGNEENMNETIRFLKEHDIHPAQVNLLPYHNTGSSKYPKLDMEYKGNDLSAPTKEEMEGFVKLFQDAGFSNTKIGGMAAKRGMNERIQKLRELSVTTPVHIDLERAKIETEFYKENDGKYSIPVMRSMVLKEYFSKKTLYLGEGELIVGEKGKDPQASPTFPELCCHSVEDMTVMSERDLVSFHTTEEDRKLQAEEIIPFWKGRSMREKLLAAMTPEWNDCYSAGMFTEFMEQRGPGHTCGGEQVFTTGYMDYKEKIKKSMDALDFMNDPEAYDKMEELKAMDISCDAVIILGERYHKLALEMAEKEADPVRKEELKQIAANLEVVPAHAPQTYWQAIQLYWFTHLAVTTELNPWDAFSPGRLDQHLIKYYEADTEAGILDDDKAKELLECLWVKFYNQPAPVKVGITLKESATYVDFANINTGGVTPDGKDGVNAVSYLILDCMDDMKLVQPNSNVTISKKTPARFLKRACEISRKGWGQPAFYNTEAQTMELVNAGKSLEDARRGGSSGCVETGAWGSEAYILTGYLNIPKVFQLTLYNGFDKESGKQLGLKTGEAKDFKSYDELWDAFQKQLKYIIDIKIRGNNVIEKLYAENMPAPCLSVVTNDCISNAKDYNAGGARYNTNYIQGVGIGTVTDCITAVKYNVFDKKNFTMEELLEAMDHNFEGYDAIFRMVHDKTPKYGNDDDYADSIMQDVFNLYHDLITGRPTMRGGKYGVDMLPTTCHVYFGEVIGATANGRKANIPVSEGISPEKSADVNGPTAVIKSCAKMDHLATAGTLLNQKFTPDVVAGEKGLENMASLIRSYFAMDGHHVQFNVIDRQTLIEAQKHPDDYRDLIVRVAGYSDFFRNLSKPLQDEIINRTEQSFEMKITVLVENSTSCRLYGEHGLSVYIEYDGKKYLLDTGASTLFAKNAKELGISLADIDTAFLSHAHYDHSGGFEAFFKENDKAEVYMQDTSAENCYFRTETGDKYIGIPVQLLEAYKERFHTLHTVCEVEKGVWAVPHSTENLDGMGRRAHMYRKVGDEFIADDFAHEQSIVFETEKGLVIFNSCSHGGIANIVREVQNAFAGKKIYAVIGGFHMMKLSGLDTLGIPVDEVVKVARELKELGVEKVYTGHCTGMIAFGIMKRELGNMVHALNTGCRIEIMNWKAVVGVSMLCITMMIRCEEKKTHSSRSNETVKEKVEMQMTIICRIIYGEKGLSSLPIQDIAGEHIDTDNEYMYYYSVEFIKMYLNTGYLNHSHMDFKDKSRPLIVGSCGTYRLSRHPKLPTYRPRGRLDYQIIYITAGCGHFHFDNVNNETIVPAGNIVLYRPKELQKYEYYGEDKTEVYWIHFTGSNVKNILRQYGFPDKEHVFQVGTSNEYEQIFKRIIIELQRCQDNYEEMLVLLLRHLLISFHRELTREHILKNEYLDHEMNNAVTFFSENYNQNINIDDYAASRGMSVSWFIRNFKKYTGSTPMQFIVGIRINNAQMLLETTTYSINEISKIVGYDNQLYFSRLFHKLKGYSPREYRKIRNRLMIVPRYYENLSVLHENTMPARAYYIPASRRMDNLVEHREESDRMQLLNGTWKFQYFNSIYDIQDSFFEKNYDTENFDEIQVPSVWQMAGYDTHQYTNIRYPFPFDPPYVPQDIPCGAYVHTFEYSRDEKAPKSFLNFEGVDSCFYVWINGSYIGYSQVSHMTSEFDVTDVLQDGTNTVAVLVMKWCDGSYLEDQDKFRMSGIFRDVYILKRPKQAISDYHIKTRIEDMLAKVEIEMKFYSPLNVKISIEDRNGAVVALGSIAEEGTAVLEVASPELWNTENPYLYKLILETENEVIVDHIALRKIEIKDQVIYLNGQKIKFRGVNRHDSDPVTGFTINSEQITTDLTLMKQHNFNAIRSSHYPNAPFFYEMCDKYGFMVIDEADIEAHGPFMIYRKEDTDYNRFKRWNEKIADDPVWEEAIVDRVKLMVERDKNRFCIVMWSMGNESAYGCNFEKALEWTKNFDPDRITQYESARYRNYDETYDYSNLDVYSRMYPALSEIQEYLDKDGSKPFLLVEYCHSMGNGPGDFEDYFQMIQDNDKMCGGFVWEWCDHAIAHGTAENGKTIYAYGGDHGEEIHDGNFCMDGLVYPDRTVHTGLLEYKNVYRPARVISYDKESGELVLHNYMDFDNLKDYVKISYELTQDGLLIGKGKLAEVSVVPHSEGKTNLQVNVPENGKCYLKLTYHLKKEMPLLEEDYILGFDEIEVSQKDAKCQLAEKWVEKTVTDSELQVSEDDTQIHIKGREFAYTIDRRTALFTEMKFAGREYLNHPMELNIWRAPTDNDMYIKSEWKKAHYDKAHTRAYTTEVVQGKHGVKITSHASVVAETVQKILDVTITWKIEAAGKIDADIAVTKDDEFPDLPRFGVRMFLDKKLSAVRYFGMGPQESYCDKHQAASHGLYRADVGDLHEDYIRPQENGSHYDCEYVELNNSRYGIVASAEKAFSFNASYYTQEELEKKTHNYELIESDSVVFCVDYALNGIGSNSCGPVVLEQYRFDDVLFRFQFTLIPYVKGMEEKKYLKWYNKIGYGSGDIAGNVVYAFLTSFIMVYLTDSVGLAAGVVGTLIAVSKLFDGFTDIFFGSMIDKTHSKMGKAKPWMLYGYIGCAITLVSCFAVPVSLGTTAKYAWFFISYTLLNGVFYTANNIAYSALTSLITKNSKERVQMGSYRFIFAFSTSLLIQAITVGFVDKCGGDAAAWRTVAIIYAIIGLVVNTISALSVKELPEEEFNEGEVKDDNEKYGMVQAFKLLVKNKYYMMICGTYILQQLYGAMIGAGIYYMTWVLKNKNLFGQFAWAVNIPLIIALIFTPTLVGKWKGMYKLNLRGYVLAVIGRALVVVAGYMGSVPLMMAFTALAALGQGPWQGDMNAVIASCSEYTYLTQGKRIDGTMYSCTSLGVKIGGGIGTAVVGWLLEFSGYIGTNATQPQSALDMMQFMYLWLPLIFDVLIMFVLSRMNVEDANKKLKAEKGIAADEVTDASDINMTGESVVWSLLDETVLFSIYKVIELYFENKKGPLHFCEMALRKYSVFTKMQLKYVDTKEEIIAINRKSKHIEPHLHNALEIVCVTSGALELGVGQELYHMEKGDIGFVFPDVIHHYQVLTPGVNKATYLIASPFTIAKFADIMQSMAPEYPIIKAEKVEPEVYRVINAILETEQSDITVAQAYLQIVLARCIGKLNLVEKSNVGSNDRIYQTVSYISANFKKKFSLEEMAKDLGVSKYVLSRLFSKTFHRNFNQYLNDARLNYACHRLENTSDSITNICLDSGFESQRTFNRVFKERYKISPSDYRSICVKEMLSMDGVIYHGNQILPGVPEFIQWLHDEKKEYLGANGKLNVEYPNGVEVMEHAKEIISVDIYGDTQEIIEDCLDILEPFIEEVIPKERKDQYYDYSEVIEIDLILEEYFNAAMSDIIGTVTRTNSKNMTEPEPGIIRYFRVLFYPQKSVLMNEFKLKAPYKPTGDQPQAIAELVKGFKEGNQCQTLLGVTGSGKTFTMANVIQQLQKPTLVIAHNKTLAAQLYGEFKEMFPDNAVEYFVSMYYKKEKRKEIDLCNICGKSKRLTWDHVPPKCCNNRYAIKTNSWMEGIPEESSYAKKYQNGIKFRSLCDECNNKVLGANYDKVLEEFANQLAIIMQTSIALPPVVKVPIKINRLCRAICGHMLAAKNFYENECLIDKELREYVLDETKLPPKKMSLLYWIYPYSTIAIMRDICVYPSHNKYKFPKGLISIMNSFPAAYIIADDEERCGLFDLFSVCSNDIDETVEIPVDCSSCYFPGTKHLRPLAWPCNISDEEDGASFMLGVDKCMNDSKIAKHSNDNIEKIRNRRKMKVFKETGYMEQSAHFGWQNKDSALYGLREGYKNSADTLVEYVLEHGENPKILDTYVFPILFSYRHCIEISLKHIYRRALGKMPPGGHNLLILWENVKNEIIDQMICSEEFLEHVKGYKENYIHYSLEGIKLTEIKAMLKEIQEANQRIEEINPSNKQIDQNAEVWRYLISTDENLFFSCGHSIDYLVLKESMNHIYEILDYLYYIVDEYLSSMKEIFSYNVDVNKTAYMNWRTKYHEQIHNMIVIADGFMKSAILLAETALDDNLDKKADIIVYPMLFNANHAIELYLKAITWTLNIVLDKTERIEGSHNIQQILQVVKSRVTEFETSREKREQFRKMISNLEEYINELFSKISSEDTKCKKDNMDFSRYPFDQKYVPHFYISEFDNVVVDLENFVERFKDIGKNLNLLSTYYLYDILEAGEMTKCKVIAFANQKGGTAKTTTTLNLGIGLAHQGRKVLLVDADPQGDLTTALGWTDADNLPITLDTQMKKILQDEPFVYNEGILHHEEGVDIIPTNIELSGMEISLVNAMSREQTLKLYLADLKKDYDYILIDCMPSLGMLTINALAAADSVIVPVQAHYLPLKGMTQLMKTIGKVQRQLNPNLKIDGVLLTLADMRTKLARTTEDSLRENYGKHIRIFKTVIPVAITAAESSAAGQSIYEYDKNGTVAKAYAEFTREVIQCGEKQRNKHESSFSRMAKSREINMNLPSVDDLFTTQEERDQKNQEYVKDISIYEITDFPNHPFKVKMDDKMLETIESVRDHGVLVPALVREKPTGGYEMISGHRRKMASELAGKETMPCIVRNLSDDQAVIVMVDSNLQREEILPSEKAFAYKMKLDAMKRQGQRRDLTSVPLAQKFKGKTSREILGEQVGESQDQIRRYIRLTELIPEILEMVDDKKISMRPAVELSYLPKEEQEILYDIMESEACTPSHAQAIKIRKFSAESRLNEDVLLLIMSEEKPNQVEQWKIPKNRLKKYFPSGTSQQKMEETIIKALELYRKREKSRERMKKIWKRVCTGLLALTTILTALPTTSAYAAETQYWTESSERVGYIEHVMNDGTIHSTFNEGHMKVEGETAYCVDINTGFKNGYKTRHDANTSMSAAQIEDVALSLEYVKQYRSSHSNLNANQGYLLEQCVVWQRLSEYLGWQCDNVRAAYSEISQDIQNEVYTGARVFVQANKGRYKCGGYIYTGEGQDLGQFWAELNVGNAKVKKITANESITKANAMYSIAGATFGIFSDQNCSNQIGTLTTNENGETNEVEVTAGTVYIKELSAPKGYKLDTTVHSLKVEAGKTATLNVSDVPKVTETLVDLFKIDMETGKATAQGNAALAGAEFTWHYYDGLYTKDNLPEKATRTWITKTVAEKSSDGSIHYVTKLTDAYKVSGDAFYTQNEKSVLPLGTLTVEETKAPDGYLLDGAYMQAGDSTEQIKGMYLTQITEDGELAVLSGSNQYSVSDQVIRGGVKIQKRDMETKDTKAQGSATLKDAAFAIISLNENPVLVEGKLYKKNETVKTIQTEIDGVATTSADLLPYGKYKLEETKAPEGYLTDGAKAIEFSITENGKIVDLTCESHSIYNQIKRGDLEGVKIGAGTHKRLANVPFKITSKTTGESHIVVTDKNGQFSTASDWASHKKNTNAGKSSEDGIWFGTSEPDDSKGALLYDTYEIEELSCESNKGMKLIPAFEVVVSRNKVTIDLGTLTDEYEKEISIHTTATDKKTGEKVIVAGKKVTIVDTVTLDGLEEGRKYQLKGWQMLKEENAELLIDGKRVESDYTFVADSEKMKVEISYTFDASELGGQNLVTFEELYDLKNPEEPVKVAEHKDTDDEGQTVLITERKISIHTTATDKNGKKEIEAGKDLTIVDTVTLEGLEIGTKYKLSGWQMIKEENAKLIIDGKEVTNDYEFTADKENMEVQIEFTFDGNTLGGKQLVTFEELYDMTNPEEPKKVTEHKDINDEGQTVTIKEVPETPTPETPGTTTKTSNTPKTGDTGNAVLWIAILVLSAAGITGVRIWNKKKQVKRLGIEEKKEEEEMGKNQKAIKVLQRLFDAGYGTEKEIVNMTMDEMLALPGVNVADLCIISELQKRIKTNKVISYLSGKTEAREETKGADYGGTTMVEQPKYLEMTLSQLKSYVESSDSNVLLVVEFPKGDQNNGEMENELEVVNIRLVREPSLYSEQILDSPQAVVELMAKELSQYDREVFCILNMKNNGQVINMNLVSVGTINASLVIPREVFKSSILANASAIIGLHNHPSGNVKPSKEDMIVTRKLQKCGQLLGIELLDHIIVGGTNGKMLSFREEKMLNVTGRMDWERMLVKVSVENFKSFDKAAELTMISSNKIRTNANHRLKIKSTQLLKYAVVYGANASGKTNLALFFKFFKDSVCNGIPIEATQMFCKNRKENKERESSFEIQITVGDKFYAYGFSAVLSRRKVTGEWLYELYQNGSAKCLFEREGSKRPVLNDGITLINTEKNKFETYADDFEGNETSLFLTEMNRGKKYSTRSKLLFFRDVYDWIQNHISIITPDTPLIDLEYYYDDNSLKLINKLIKTFDTGISQVKIEEITLDELSNALPKSVFDKMMQHVKNRMEEQEEPSFRMTMRSKETFFNIEVEGHSEPKVTTIRLHHNKSFYEFGFDEESDGTRRLFDLMDMLLNKREDVLYVVDELERSLHPKLTERFLQLFMQLHDEQRMQLLFTTHESSIMDQAIFRRDEIWFVERNAENASSIYSLDRFKERYDKVLSKAYLEGRYGAIPVFSTFDFREEEMAPVRSYTNWNSRTTDEEEQIEPYRKYFFICEGANTETWYFKKLIDIRKELNIHPLIDIRLLEKTEGDRDISFPRRLIEFAENQKENPEIAFDKERDKMIVVFDGDIFEEKVLDYDELVAEGEKNNILAVSNPAFELFLLLHYENSYEDDIEPNAEQIIQNEKDGHQTFIYKLLLARTGINPKKNSSIGELAKNIEIAIEQEKKINEDIHQCKGQITCNIGRIIDEIRKDDGKMDKAEKCLERRNNKRKIYYRTEKGYNLVNQAQEMITRERCVVLDEKQILIPGCEIWFTDGEVIDAFATKENETYYMFINKAIIEEQKEYLEKLNWKFLIDSGIKEEYIDSLIEYGLYFVIFHEYAHILCGHVEANLEDHEDKKAEECEADMFSMDYLINFLLHTKESIEWSSEIEKLFLAIYFMMENSQANEYREFYNDKLIQNYYDPERIEKRDHPLNAQRIIYLYEMLNILIVDEKVQLLPIREGIINKLKIVKNISENRDSNVKNYNVINDSIRQLKQSLINIRKKIPRLTDMPYIPPSVVREVKRMDLLTYLKNYEPYELVHFSGNTYTTRTHDSLKISNGKWMWWSQRTGGRSALDYLIKVKGYSFLEAVELLAEKANIQPPISVSENVPMEKQLLLPKKNQDDQKVIAYLLGRGIDKEIIQFCLESGRVYESAFHHNVVFVGMDEKDNPKYAALRGIGTSFIGEANGSDKNYSFSIFAEKSNDTVHLFESAIDLLSYATLQKLDGKEWRREHLLSLAGVYQPAKEIEKSKVPAALARTLKMHPEVKTIVLHLDNDRIGRLATKAISTVLPKQYQIKDVPPKQGKDYNDLLCIKLNLAITKREKSMKKNMSGHEKYERMKIARYELKVVYKKELILMMEDDVDSEDLLKIFWETQLKEEKEQSELLGIIAEKMSEESCTEQCESCQKYCPASEECMETDENVRCTKCEYLCETCGICELKEMQVEVSMKDKKKAERRYQEYLKKMNKKKGEQKKMIVKEMIAEKVFAEGVAKDIRNFLPAKYENAEFQVMQMNKNNGVQMVGVQVRLQEENVCPVVYVEPFFNEIRLGEPVEKVMNEIAKCMEEAGNAPFVHNGINPMDYDSVKEHLAVMLVNTQANKRMLQEMPHENIEDLSAICYVDFPVESNDGKATMKVKNEHLKMWNVDAKEMFHQARANTQPVNTPILQSMDEMMLSIFNEEGHATNLLDENVDFGFRSHDMLYALTNVEKQYGASMITQPEVLNKLEQLFPEGFYVLPSSVHEVLIVPDNGEMEPKMLGEMVREVNKNEVERQEVLSDRVYSYDKEKHQIRQEPDSIQKVKEMERMRKRNVAILFRLNKKEAEVLDKKVKKSGLNREAYLRQLISGVVPRDAPPPDYYSMMRELHKIGNNLNQIAQKAHVLNVIDVQRYDQEVWKFNEAVRKITEAVILPEKNESWQMAVTSIWSIKGWIGKVINYAENPDKTKEQTSQELISESETGQLQGLNDVITYAVNAEKTRLRQSKSMEMEVVGESEELMEQYVSGLNCAPTTAREEMIAVKKRFGKEDGIVAFHGYQSFAPGECNPAMAHEIGKKLAEELWGSQYQVLIATHLDKANHLHNHFVVNSVSFIDGKRYHRTNQDYRDMRMVSDRLCKEYQLSVVRQPEQGKGKHYAEWQAEQDGKPSYHSMVKADVDEAIRKARTEKQFFFYLREKGYSFKFGKDITIRPEGRERGLKLKRNFGENYSLEAIRVRTLEENELPAEKKFPVQRHYRIRVSGNFKQTRKIGGLRGLYLHYCYLLGILPKNRPSISAKQVHVLFREDLLKLNTVSKETKLLCHYHIDTAEQLFSLKDHLQKQMEQCAEERKHLRYKIRADRPEEEIQEMKEQIKVLTEKIGTLRKEAALCDGIAARSKVIEEKFKMVREEKEQKEEQRHEHIRRSRMNTSGEAADQVVRMSLEVGEAALKISGTGAKHLAVMLYAVLKEKKKTKGRVRLETLVKSGRPLTVFSVKESDLKQFVQEAKRYGVLYCAVRNPRGSSDGLIDVIVKEEDAPRINRIVDRFQFASVTEAAKIKTEIERTRAEKAKAGKSEKQEKKPEKVQVQQEKQGQAEPEKDYPQKSKEDQLMDELFGESVKKEGKEQNPSLAKTTKSRLSEPTSKKQEKTAEGTSKLFTPEKPEKPSVRKELREIQNARKKEAERRENRNDPVRNQGNKDPNQIRHQQPQQKRKPRKGKERMDNSFDSLLNASAVPQDEKVQAFIAESKNNRNRCYELSEQVTAQVATDGKMLQKYLDVQSTFDRYTTNNALLILAQRPDAQKLGDYGYWRDHGFYLKRMEQQNPVLILEPGKTYKREDGTVGNYYNAKKLYDISQTTMSDTTIQKSEYEEHDLIRALVSTPPVNIVAAEPEQMPDEKGAFFKPEEGCIYVRKGMSAQEIFQNLVPELVFAGYADGNPHYDKNEDAFHVSCASYMLCKKYGMDTSRYNFLHAPEFFEKMETQEVRVELSRARDAANTISARMAKVLDQNRNATYRQSEAEKNGQDSSENVKDKKENPEPEKKEQKSRGQHRKEARMSSDTITLELDKYESGVVFHSLKDKRNQMLKEGKDTELVDDVLMKVIEKIEVPSEKEKRGRRSHEERMKNDDEQSSLMLAVIGIIPVIWFALLVAPYLSSGLMGILDGVPEAMNHPFSIRLCGDSVKTVLIFLLSYGMGIGIYISTKKHYRRGEEHGSAKWGNVKKINRRYKEKRFTKNKLLTMHVQISYNMRKHLRNVLTVVIGGSGSGKTRFFAKPNLMQANTSFVVLDPKGENLRDTGYLLEEKGYEVRVLDLINMEKSHCYNPFVYLKDDNDVQRLVTNLFKATTPKGSQSNDPFWDTAASMLLLALIFYLQYEAPEEEQNFPMVMEMLRAGEVREDDDQYQSPLDELFERLEMKNPEHIAVKYYKDYHSGSAKTLKSIQITLAARLEKFNLSSLAALTATDDLDLPSLGERKVALFALIPDNDTSYNFLVSILYTQLFQQLFYLADHKYGGRLPVHVHFLMDEFANVSLPDDFDKILSVMRSREVSVSIILQNLAQLKALFEKQWESIMGNCDEFLYLGGNEQGTHKYVSELLGKATIDTNTYGKSTGHSGNYSTNYQNTGRELMTPDEVRMLDNRYAILFIRGERPILDEKFDILKHPNVGLTTDGNGKPYLHGAVDRAVASISLGDSLEGEFTDDSLEVEDYELLSDEDLEEIIQKYQMKLDMRKKQEKKETTKSTKKLPMTAKMKRAMAVYIAMVLIMTAGASTVFAADDPLTVINNLSTFIFGLIRAIGMILLGFGIVQVGLSLKSHDPSQRANGFLTLAGGVIITFAKEILNLITGMSDNWVVQNLQNALDTWNSKLAEIWQILTQSPETFKGGGIWQVIVQIHGALQAIGYALLVLFFVVGVVKTCGSFTEVKRPEHALKIFIRFAITKGVVTYGLELMMALFNIIQGVTSTIMQTAGFGSTEDTVLPDEIIEAVEDCGFFESIPLWAVTLIGGLFITVLSFIMIMSVYGRFFRLYLYTAIAPIPLSSFAGEPSQNIGRSFLKSYAAVCLEGAIVVLACIIFSLFASSPPVVNPDAAVVTMVWSYIGELIFNMLVLVGAVKMSDRVVREMMGLMPITVMISLVVTVALFLISLLFRIAARLNLTLPLLYFLAVSTILNPWAATHEKLAFAILYLLTAFSVLSWIFALRRKWQEHQYYKVMKDDMSFQISRARQRGIPLDSVHFDSQGNMRYNDSKDIVEMEVKINKEIRDYTEAIFFGLSLRQFIFSGLACGIAVGLYFLLHPYMSMETVSWICVLGAAPCVVFGFVKYHGMTAEQFIWAWIKSEILMPKKLVFRSENLYFDAVEPVIKKYEKESLKKEGRKKNDKNAEMIKTLSNIFKQDKEKFVIPRSVQQVIPIETIWSDGIFKIGRNKFARTYKFTDINYAVASKVDKETMFLEYMDLLNSFDCGGTTKITINNRRLNKVDFEKAILIPMQEDGLDLYRKEYNNMLLDKATSSNSMVQEKYVTVSCYKKTIEEGRTYFARVTTELNSHFARLGSKCVEINGEDKLRILHDFYRTGEESGFHFDIQENMRKGHSFKDYICPDTFEFEKDYFRMGDRYGRVLFLREYASYIKDDMIAELTDMNRNLMLSIDVIPVPTDEAVQEVEKRLLGVETNITNWQRRQNANNNFSAVIPYDLEQQRKESKEFMDDLTTRDQRMMFGILTMVHTAESKKQLDADTETLLTIGRKKLCQFSVLKFQQMDGLNTALPIGHRKIPAVRTLTSESVAVLMPFRVQEIMDAGGIYCGENAISHNLIMCNKEKLLNPNSFLLGVPGSGKSFNAKMQIVFLALATQDDILICDPEREYASLVEAMGGEVVRIAAGSRDHINAMDMVDGYGDGGDPVIEKSQFILSLFEQLDKKGINAKERSIIDRCVGEVYEEYQHGGAVPTLRVLREKFLEQEEPEAQDLALVSELFTNGSLDAFAHESNVDVNNRIMVYDILDLGKQLKTMGLLVITDAMLNRVTENWKQGKRTHIFLDEFHVVFENEYSGAFFNSAWRRFRKRNAFPTAITQNVEYLLDSVLASTMISNSEYIVMLNQAEPDRAKLATLLNISTEQMGYITNADAGCGLVKYGSSLVPFVNRFPTNTRLYKLMTTKPGEDSINRGRMMSEIRFSSKEHEKFFYQMLAKCGKHDSYYSSFFYCVGISEDTRNHVDRMFDFKERLIKPEALHEGWQTGGSARLTRLAFNLWNGYVEKGEESLSTPYEMFDCGYASYFYEAIRMKYPEYCRELPQVSKKETNHERMDRKIKTRQVHKDIKVLDKTVTVTDHVKQSYVRTKENIMQSTEKSSDRENNPVGYAEDAASKYADRIFHETGHQVRRQAGKIIERKKEKASVSSTGEETVYQPKEEIRPVPPSGGETAQEQGKELAVKKIKTIERDKRTIKTGRASEQVVKNTGKGTIKTSGKAVKTAEQTAKTSIKTSEQTANVSVRAMHYSMKKAEKAVQAARQTAQNTKIAVKTTAKAVTHAIKALMEAIKALLSGLTAGGWIAVVILIIVILFGGFLCMTGGDNSSTVSSVSAEVEAYEPLIRQYANQYGIGEYVELIKAIMMQESGGRGLDPMQCSEGSFNTKYPKQPNGITDPEYSISCGVQEIKSCLERAGVKNPLDMENIKLALQSYNYGNGYLEWAKARGGYTLANAAEFSDMMAQRMGWSSYGDKQYVPHVLQYYAFGRIPTGICNQAIVQVAASQEGKGGTTYWRWYGFGGRVEWCACFVSWCADQSGYIQSGVIPKFSLCSDGVKWFESKGRFRDGSYTPVAGDIIFFDWGNNGTIDHVGIVESVSGGTVNTIEGNSGDKVARRSYRIGSSNIYGYGVPAYMEYMNHIEKKEYAVMYTMIDSDEKVYLTKEEYIQRNSKIYEGIEVSDIKISHIAVKEKKADTVTLSYETSCNTIAGTIQFDNMAELKKTKQGYKLVWQDSLIFPDLESDDKISVTTSKAERGEILDRDGKMLAGKGVATSVGIIPGKLEDRNVSIEKIAELLEIDVETINNKLTAKWVKEDSFVPIETIPKVEEIDLMKIQPEEKTLEEQDCQNKLLEIPGVMLSDVEVRTYELGEAAAHLIGYVQSVTAEDLENHPGEGYSAESVIGRSGLEKLYEKQLKGKDGCDIKILDSDGEVKEVLASIFKEDGMDIRLTIDSDLQKSLYEQFKEDPGCSVAMNPYTGEVLALVSTPSYDNNEFIRGLSSEKWTSLNEDEKKPLYNRFRQVWCPGSTFKPVVAGIGLKTESIDPKEDFGNEGLAWQKDSSWGSYQVTTLHEYEPVIMKNAIIYSDNIYFAKAALKIGSENFMNTLNEIGFNQNMPFEIAMQESTYSNTDKIETEIQLADSGYGQGQILVNPLHLASIYTSFLNEGNMIKPYLKYKEEASGETWIKNAFSKENVEEIMQGVEGVVNDPEGTGYAAHRDDILLAGKTGTAELKATKEDTSGKEIGWFSVFTADKSVDKPILLISMVENVKGIGGSGYVVKKDATVLDEYFEEMGNYYICKIFAMILIVLIVFTGCGQNRITEKEEKKETVESEMNAEVKKTAQTFRSVYMKEKSELNTLKVKRKIINCLEEKGYAAVDCDNQIDMVNREKVEDFCKTAEKEEQAAVDIVVVFDEGEIIQYHLESMNGKINVRLCQVKWKDNSPQANYYDEYEAYEWKYTEKGYLFLEEYHPPGFDGAPGETGFRVQPLDKTCRELNRKYVMPLGYALNNLLITNWDNQNYTELDFYDLYEKMYYMKYGKQVPYEANYGGAEYEVPKDEFEEVIKTYLPFSNSEIEKGTFYNSDNRTFRYRPRGLYDCEFPYEPYPEVISYEKLQDGTLKLTIEAVWEIRMLDQAITSELMIKPMEDGSFQYLSNKVISSDQNANAGWYMPRLTEEEWEENYSNNMKRKSILLVLCIGMILTSCESKISLNSTDVKNEKNQKNTTMENPDKGYNLPIDEDKKKEVVNDCEEIMGIVRDIYSEYNGIQEADQNTAEQMMNRMKEIIKQNGNPVIGSDHYSVMDNYQKMEQFLKSAEQEEKGSVILYEADTDGGITRKEYSYDGKEMSVMSAKMIWSEDTEPVLTYISLSKIKEWAYTENGNFCYELCVPEPPEVTEIVDGSCIIRVKPLSEECREYLKKYVSTFGYQGNNLLCSNWNAEDMQGLDYNGLYEYFYQMKYGEKFTAEKEMPQCVVIADDLTGANATGVLLKKMNYKAYTVMNTERIELSTLSDCDCVLYPTDSRGVDAKIAYNRVYNVCNLLKDDDVKVYANRIDSTLRGNLGSETDAMLDSLGEDYIAIVAPCFPASGRIICGGYMLVDGLPLHKTNIAVDPKTPVKISEVGELFKQQSKYQVSTIYMKDLMHGKHYLADLMKKCVEEGSRIITLDCITQEDLDLIADAVITSGLKVIAVDPGVFTATLSRKLITPNKKKQKTKILAVVGSVNANTTAQMEELWLSQRTHNEFVHTRELLEGEKRRELEIRRVVNSILGECDRNNISTVTGDGIYPENRIDFTPYMERYQCSLDEVTEMINSGFAEITYRIFKAEDTFKGLYTSGGDITVAVCKKFDTAGLSLLDEVLPLAAYGQFLKGEFEGVHIITKGGSQGNKDAINKCITYLKEKLYIMKKPVIAIPIGDPAGVGPEIVAKSIASDEVFQIAVCVIVGDRKIVEKAIEITGENLKINEIKEPEEAVDEKGVLNLINLDNVDMDTFAYGKVSAMCGKAAYEYIAKSIELANAGKVDAVATTPINKESLHAAEVPYIGHTEIFGALTHTEDPLTMFETNGMRVFFLTRHVSLRQMLDMIKKDRIIDYVKRCTKALERLGVKEGTMAIAGLNPHSGEHGLFGWEEVEEIMPAIEELKAEGYDVAGPIGADSVFHQAAQGKYTSVLSLYHDQGHIATKTLDFEKTIAITNGMPILRTSVDHGTAFDIAGKGIVSAVSMIEAIRLAAKYAPNFTGKHEKMVNGLSGERMLIGLAVGIAVLIFLVLKTKIQAFLALIISTVVMIKGAIFDVDGTLLDSMEIWEDVGVRYLNSIGIEAEPDLGTVLFTMSIQEGAAYVKEHYHLSQEPEEIVQGVLDIISNYYKKTALLKSGAKELLEKLDKHNIPMTVASSNNKKEIEMAFERLGIAKYFDRIFTCEEVGAGKTKPDIYLRAAEYLGTRPEETVVFEDVIHAIRTAKQAGFQVVGIYDETSKDDQEEVRREADWYCREWAELMKKKTALTIAGSDSSGGAGIQADIKTMQANGVYAMSAITALTAQNTTGVTGIMEVSPEFLEQQLDAVITDIRPDAVKIGMVSSEELIKMISKKLKEYHLENIVVDPVMVATSGSRLISETAIDTLKTQLLPMATVITPNIPEAEVLAEMEIRSEDDMVEAAKKIHEMYHCAVLCKGGHSLNDANDLLYQDGEATWFHGKRINNPNTHGTGCTLSSAIASNLAKGYSLEESIHRAKEYISGALEAMLDLGKGSGPMDHGFEMRGKFSIMCKKMKKEDLLLYAVTDRHWLNGETLYSQVEKTLEGGTTFVQLREKELDEAHFLKEAKEIKELCARYRVPFVINDNVDIALEMDADGVHVGQSDMEADDVRAKLGPDKIIGVSAQTVEQAVLAEKRGADYLGVGAVFHTDSKADVAEVSRETLKAICDAVDIPVIAIGGISKENVSELAGTGICGIAVISAIFAEKDIKKATEKLKSLTGEMVKAMLGNCIENVRKNVPLVHNITNYVTVNDVANVLLACGGSPIMSDEPEDVKEITSICGGLNINIGTLSKRSIEGMFAAGARANELGHATLLDPVGAGASTLRTNTAVELMEKIRFDVIRGNISEVKTLAQGSGTTKGVDADVTDAVTEENLEEGIAFAKAFAKKARCIVAITGAIDLVSDADRCYVIRNGRPEMGKITGTGCQLSGMMTAFLTANPEQKLEAAAAAVCTMGLAGEIGWSYMQKGDGNATYRNRIIDAIYNMDKETLDKGAKYEIRMGEQLTESDVKKIKEEIEYRKIVVRKKELEAVKEARAQGDLSENFEYKAAKQDKNRNESRIRYLERMLKNAKIVSDTSKADEVGINNTVEVYFEDDDETETYRLVTSIRGNSLQGLISIESPLGKAIQGHKVGDRVLVKTNGNDGYYIVIKNIDNTTDDSHDTLRKYMSALFFDIDGTILSEITHKIPESALEALHKAQENGHKTFINTGRTICSVPPMIKRISFDGFLCGCGTHLIYGEQVVFHHSIPYERGREIIKSMKDCKVEGFLEGTEDIYYSNRISRLEPVESSRRYMAGLGLGREQAMEDTGYDFDKILIYIDKMADGERFFKETEDVFNHIDRLGGVYECVQKEYSKATAIEYIQKELHLADDEIYAFGDSSNDLDMIKAAGHGVIMGHHDPVLEPYAEYITDTVENDGLYKAMEHYGLIMITLEHFDEVDMRVGTITAVSLNKRARKPAYKITVDLGDFGTKNSSAQLTNYEPEELVGKQVVCVCNFEPMRIGDVKSEVRLLGSDTDEGCILLTSLTPVKNGSKIFMANRINLNQTSFHGAGAIKEIAAEVKVRGLKKALVCSDPDLIKFNVTTKVTKVLDDAGLEYELYSDIKPNPTIQNVQHGVEAFKKAGADYIIAIGGGSSMDTSKAIGIIIANPEFEDVRSLEGTAPTKNPCVPIIAVPTTAGTAAEVTINYVITDVEKKRKFVCVDPHDMPVIAVVDPEMMSSMPKGLTASTGMDALTHAIEGYTTKAAWEMTDMFHLKAIELISKSLRSAVANEKEGREGMALGQYIAGMGFSNVGLGIAHSMAHTLGAVYDTPHGVACAMMLPIVMEYNAECTGEKYKEIAKAMGVEGVDDMSVEEYRKAAVDAVRKLSVDVGIPTKLEALKEEDLQFLAESAHADACAPGNPKDASVEDLKDLFRKLMMEETKHDKMKYRLADAMKNCMKKMPVEKITVKEIVTECGTTRQTFYRNFQDKYDLINWYFDRILLESFQHMGEGKTAYEGLVNKFHYIEEEKLFFKAAFRNDDQNCLRDHDFQLILRFYENQIQEKTKQPIPENLHFQLEMYCQGSVYMTTQWVLGDMKKRPEEMARNLVAAMPAELETLFKKLELLMSILNVEHLTHGFGDRAIFSDVSFRLLKGEHIGLVGANGEGKSTFMNIVTGKLVPDEGKVEWSKNVYAGYLDQHAVLEKGMTIRDVLKSAFDPLLQKEQRMNEICDLLGTADEEEMNRLMDELGTIQDELTLHDFYTIDAKVEEVARALGLLDLGLDRDVTDLSGGQRTKVLLAKLLLEKPDILLLDEPTNYLDEEHIAWLKRYLLDYENAFILISHDIPFLNEVVNIIYHMENQELNRYVGDYDHFQEVYAVKKAQLEAAYRRQQQEISELKDFVARNKARVSTRNMAMSRQKKLDKMDVIELAAEKPKPEFHFRYGRTPGKMLFETHDLVTGYDEPLSKPLNFSMERGQKIALVGTNGIGKTTLLKSILGLIPSLSGSCELGENLEIGYFEQEVKGENKTTCIDEIWQEFPSFTQYEVRSALAKCGLTTKHIESQVRVLSGGEQAKVRLCKLINRDTNILLLDEPTNHLDVDAKDSLKKALQEYRGSILLICHEPEFYQDVVNEVWDMSKWTTKVFMNEIAVVTEQDIPDILRMIHEIYSELPNKEWFSLDSDEEVTSYMMTGGFGLKAMCDGRLAGVFIARTKNLGDENLGYDLKFDEDQRKQSVHMEIAMVRKEYRGQGLQRKMMEESEQILKEQGYHYLLGTAHPDNVASVNTFLKLQYEQVMTKEKYGGMKRSIFCKAIMAATYVKPGELGLNPEKLTEMLTELEQTVEIHSISVRFDGKVILEGAWEPFSLEKPQMLHSLSKIGTSICLGFALDEGKIHLEDKLLDYVRDELPEEYDPALEDLTIYHLLTMQAGSKECCNNVWFSKLTRDWETNWLKQPKIREDIGKAFHYDSGCSYTLSRIVTKVMGKNCLALMQERVFDKMGFGEINWLTSPEGHNTGGWGMYLTAGKISALAQLLLQKGEWNGEQLIPAWWTEEIGKMRVVIPEDEKKALTHYAYHIKAGKEIFAAEGAFGQYLICFRDYPVAIGITAGASEYLAADICLKYIKEAVQIPCEKENLEEAQEKLEEKLVHLTLPKPEGDKKDTNEATKKLLNKRIVFTENPRQIESAVISTVGEELKLELTVAGEKKILFAGYKDWKCNDMYPNDFTKRYHAVSYAFDEDSLYLSVGLLNTSYREEYCLWVNSENVVVGTWRPNVTYLPAEEDMTWKFTGTFEPSCILMSNKNLIVNTPEPKPGILERGDLFAIAVGMVIGSGMVTLIGPAMAMTGYSVWLAYLTAIVMGFFMVFPYIILGGTMRVAGGPYSIVTNLSGVSAGGLVAYTKLVTPILNSSFALALGLYVNNLLPGITVKAIAVVGICILFVLNLLGMDIFAKVSKILSTILLITMVLYVIFGLTQIKQPIFQFSGDKMFTGGFKGFMLAALLLINSANGYYNILWYGKDAKKATKDVPFASMACVPCLLFIYVGLAMVTGGVLPHDEVAGAPTILPAAQAILPGAVYKIFMIGGPIMAIITTLNGVFNDVRYPLAQAAKDGWLPKFILKENRFGAPYLIYTYTLIVVLIPIVSDMSIVTITNIFQVITFFMNVTVVYAISRLPKRYPEAWAKNKFHFSNGALYTFCTVSIIIYTVIFVKGIFSIKVSYAVAAVIVMLALILIGIYLTKKGGIRIETSLWDPSVKKEEKMLGLKPIKMLPARERVAAALRKAIISRQITEGEVLTLESTAQELGVSITPVREAFQILERDGLIDLQQNKGATVLGINETTLREHFQIRAALESEACVLCCKNRIDMSRIEQVLTVSKEMIEKQDYENYSKLNQSLHMEIWIAAGNEKLKKMLSELWSGLSMGVKMTEAEYAKKSLKEHEGIVESMKKCDTMEAAMKMHQHIERSLEDVLTEFEKMSHISYAFNHSDIEATAYALTVLPRLGLAESEAQAEINYQLCCSAAKKLINHATDITPDEFRTIIAALQAAKLIILGDIEVDAKTCSECKSYFFTINKLLSTFEKQLLQEMATAKFYGTGRRKKSVARVYLVPGTGKITINKRDIDEYFGLETLKVVVRQPLAATDTEGKFDVIVNVKGGGYTGQAGAIRHGVARALLEADVDYRPVLKKAGFLTRDPRMKERKKYGLKAARRAPQFSKRMKTYMANPDKIERKWYVVDASEYTLGRLASEVAKVLRGKNKPEFTPHVDTGDYVIVVNAEKVNVTGKKLNQKIYYNHSEYVGGMKETTLAEMMAKKPEKVIELAVKGMLPKGPLGRSMIKKLHVYAGPEHAQQAQKPVELKFMWAYNSIFYQIYPIGFCGAPVHNDGVCVPRIRKLMDWSEYLQTLGVDSILLNPIFESDNHGYDTRDFKTIDCRLGTNEDFKEVCEDLHKHNVKIVLDGVFNHVGRGFWAFKDVQEKKWDSPYKDWFHISFDGNSCYNDGFWYEGWEGHFELVKLNLQNPAVVDYLMECVKYWIDEFDIDGLRLDVAYSLDHNFMRRLRSYTQELKPDFALIGEVLFGDYNIIVNDEMLHSCTNYECYKGLYSSFNSMNMFEIAHSLHRQFGSDQWCIYRGKHLMTFVDNHDVTRLASILTNKKHIPLAYGLLMGMPGIPCLYYGSEWAEQGEKAPDNDYALRPCFEEPKPNELTEFIKKLIRVRQESDALCNGAYKNVVIQNHQLVFERCSEKERVIVAINAADYPYTANAGELNGTAADLLTGETVTMNGQLELKPYSVQYLKFMAVSFVSLKNEMWYNRTVSDLPEHSLWQTQKGWMSNVGLQMQKKIDLVNGPVLSSLTRLAVPIMATSLIQMAYNMTDMIWIGRIGSSAVASVGAAGMYMWLSNGLAALAKMGGQVNVGHALGASNSEEAAEYASNALQLTLILGIIYGLVCILGAKPLIHFFHLNQAQVIRDAIYYLEITCGLVLFSFLNQTYTGLFTAIGNSRPVFLATTTGLVVNIILDPVLIFGIGPFPVLRVTGAAIATVIAQMIVTVMFFIFAMKDTVLFQYVRYLKKPDLHHMKGIVRIGFPTSVQSMLFTGISMIIARLVAGYGDAAVAVQKVGSQIESISWMTADGFAAAVNSFTSQNHGAGKKRRIYQGYVSALKVVFVWGIFCTLLLICCPAPVFRIFITEKDVIPLGVDYLRILGVSQLFMSLEITTAGAFSGYGKTVPPSVISIVFTALRIPLALILVHTTLALNGIWWSITISSILKGVLLFVWFYIFMRGEKLIYNRKMAFKEVAIESLEFNPFTKISKEWMLVTAGDEKKSNTMTASWGGVGIMWGKNIATAYIRPQRYTKKFMDETGMYTLSFLSEDYRKALSVCGSVSGKDVEDKWKEAGLHPYAVDGTTAVEEADLIFVCKTQYTQDMKPECFDVKENDEKWYPDKDYHTMYMGEIVKVLKRVMGIYEELVARGLIAQVTDEDRIKDLVNNGKATFYIGFDPTADSLHVGHFMALCLMKRLQEAGNKPIALIGGGTAMIGDPSGRTDMRQMMTPETIQHNCDCFKKQMSRFIDFSDGKALMVNNADWLMGLNYIEVLREVGAHFSVNRMLTAECYKQRMEKGLSFLEFNYMIMQAYDFYELYQKYGCNLEFGGDDQWSNMLAGTELIRRKLGKDASAMTITLLLNSEGKKMGKTQSGAVWLDPNKTSPFEFYQYWRNVADADVLKCIRMLTFLPLEEIDKMDSWEGAQLNTAKEILAFELTKLVHGEEEAQKAQEAARALFSTGAAADMPKTELTEEDLTDGNIDILTMLVKSGLTASKSEARRAVQQGGVSVDGEKVTDVFQTFAGEALSGEGVVLKKGKKNFRKVLVKMKKIIFLGDSITDASHCFLENPLGNGYVNMVAEKLNDSDGGRKKYDIMNRGHDGFTIHGVKRILEKECILKRPDVVSILIGCNDVGVMMNTGKSLEEQQFEACYEAIVKEITEQSDAKLICMSPFIVPYPRMYENWIPGIKQTERIEKKIAEKYHADFLALQDMIILKAEKAGYESVTTDGIHLTEYGNEIIAGAWLQLFEKIKDGDMIIKNVIVYTEDKKFTAGGIVIHDDKIDNIYTTENVPDMIGEEVIDGRGAYAIPGLIDLHFHGCMGDDFCDNSKEAIENIAKYEASVGVTTIAPATMTLPVEELEAILRTAAEYKKEQNPKGADLVGVNMEGPFISPVKKGAQDERNIMPCDTEICQRFIDASEGLVKFVGLAPEESDEAVAFVKAMKDKVNISLAHTNADYAHAKAAFDAGANHAVHLFNAMPAFTHREPGVVGAVSDSEHVMAEIICDGVHIHPSMVRAAFKMMGADRMILISDSMRATGMPDGQYTLGGLDVKVVGNHATLVSDGALAGSVTNLADCLRTVVKKMEIPLETAIACATINPAKSLGIEDTYGSIAPGKKANIVLLDENLELKMVIKDGQELMEYYVKSVVPIIESNYDKFTTVERNIADFFIQNRKKVDFSAKSIAERLFVSEASLSRFAKKCGYRGYREFVYQYEETFVEKQESITGNTRMILNAYQELLNKTYSLVDEAQIARISRYLNQAERVFVCGTGSSGLSAREMELRFMRIGVDIDSLVETDMMRMQAVFQDKRSLVFGISISGTKESVLFLLQEAYRRGAKTVLLTANNRGDFEQYCSEVLLLPSLRHLNHGNVISPQFPILVMLDIIYSYYVEQDKYEKEVLHDNTLRALEEGEALRRSLLKMKKYISIDIGGTAIKYGIVSEDAEVLLKKEMKTEAQKGGPAILDKVIGIVEALKEEADAGVCISTAGMVDIEKGEIFYSAPLIPNYIGTAFKKTVEERFGIPCEVENDVNCAGLAEYKAGAAAGSKAAVMLTIGTGIGGCILLNGEVFHGFSNSACEVGYMHMDDSDFQTLGAASILTKKVAAWKEEPTENWSGYHIFEEAKKGDEICNRAIDEMVDVLGKGIANICYVVNPEVVVLGGGIMAQEAFLKDKIEKAVEKYLVSSMWEHTRIAFAKNQNNAGMLGAFYHFQGRHQMIFGNINNLSEFPFLEEQVKECFEYAKTHDLASYEKGSHEIDGDRLFVNIVEYTTTTPEERFWEAHKNYLDVHVMIHGNEQIDLNFIQNMELKDFVEKDDFLPMDGEKNSSVVLTDGDFLICYPSDGHRTAVQVQEPEAIKKAIFKVKIMQGFTVVDLVILVIYLAAVLFAGLHFAKKEMKGKEYFKGDGTVPWWVTSVSIFATLLSPISFLSLAGNSYAGTWIMWFAQLGMLLAIPITIKFFLPIYSKLDIDTAYHYLELRFGSKGLRVLGAVMFIIYQIGRMSIIMYLPCMVLGSLTGISVNLLIIIMGIIAIIYSYTGGLKSVLWTDFIQGSVLLIGVTFALIFLLAHLDGGFGAIAHALTTEHKFLAVDQPIFNANIFKDSVFIMIVGAGFNTMASYVSSQDIVQRFTTTTDTKKLNKMMLANGGLSIFIATVFYLIGTGLYVFYQQNTLPPAAAQDQIFASYIAFELPVGVTGLLLAAIYAAAQSTLSTGLNSVASSWTLDIQARLSKKELSFEKQTKIGQYVSLIVGIFAIVVAMVLANGGVKSAYEWFNGFMGLVLGILIGTFILGAFTKVANTFGAVCAFIVASGVMVYIKYFVPADHVSIWSYSIISIVVSLVIGIPASIIWRKAKGDNSVPAPNTTIYKNMRNLEKYKGVIPAFYACYDNEGNVSPEGVQALTKYFVEKGVKGVYVNGSSGECIYQSVEDRKIILENVMKAAEGKLTVIAHVACNNTKDSQELARHAESLGVDAIAAIPPIYFHLPEYAIAQYWNDISAAAPNTDFVIYNIPQLAGVALTQGLFAEMRKNPNVIGVKNSSMPVQDIQMFKQAAGPDYIIFNGPDEQFMSGRVIGAEGAIGGTYGVMPELYLKLDEYVRAGKMEEAREIQYACDEIIYKMCSAHGNMYAVIKAMLKINEGLELGGVREPLPALVEEDMAIVEEAAKMVRDAKAKYLMNQKVENLKGKLIVSCQALSNEPLHSSFIMGRMALAAKQGGASGIRANTKEDIKEIQSQVDLPIIGIVKRDYDDSDIYITPTMKEIEELMEVKPEIIAMDATISKRPGGKTLDEFFKEVKAKYPDQLFMADCSTVEEALHADELGFDFIGTTMVGYTEQSKGDKIEANDFEILRKIVAKAKHRVIAEGNINTPEKARHVIELGAYSVVVGSIITRPQLITKSFVEEMERMKELSTTTKTLENKIEQYYTDCRTKEGTKQMVIYKAKDYQDMSRKAANIISAQIIMKPNCVLGLATGSSPVGTYKQLIEWYKKGDLDFSQVTSVNLDEYKGLSPENDQSYRYFMNTNLFDHVNIDKTRTFVPNGLEADSDKACSEYNEIIRKQGGVDLQLLGLGHNGHIGFNEPGAAFEKETHCVDLTESTIEANKRFFESEDDVPRQAYTMGIKNIMQAKKILVVVSGEDKAAILKEVLYGPITPEVPASILQLHNDVTIVADAAALSKINMMHRTIDFPNLGIHLKSVGDHITVFGFDIAYYGIVIGIGILAGLMLAVMEAKRTHQNVEDYYDLAIYGVIFSIIGARAYYVIFSWDMYKDDIKSIINIREGGLAIYGGVITAIIVVFIFAKIKKLSPFLLFDTGGFGLITGQMIGRWGNFFNREAFGEYTNGLFAMRLPVDAVRSSDITTKMWNHAETVKGVMYIQVHPTYLYESMWCLMVLIIMLLYRKHKKFDGEVFLIYLLGYGLGRFWIESLRTDQLLLPKVGLPVSQLLAGTIVIVSAILVITGRKKAARIKSTESNQMKLGIVGLPNVGKSTLFNSLTKAGAESANYPFCTIDPNVGVVTVPDERLNVLGEMYHTKKIIPAAIEFVDIAGLVKGASKGEGLGNQFLANIREVDAIVHVVRCFENSNIVHVDGSINPLRDIETISLELIFSDLEILERRISKVSKVARNDKSAAKELGLLNKVKAHLEDGKLAKTFEEVDDEEEQAWLESYNLLTYKPVIYAANVSEDDLADDAANNEGVQAVREYAKGEQSEVFVVCAEIEAEISELDDDEKKMFLEDLGLKESGLEKLIKASYKLLGLISYLTAGEPEVRAWTITEGTKAPQAAGKIHSDFERGFIRAEVVSYDDLIACGSHTAAKEKGLIRLEGKDYVVKDGDIMLFRFNVMSKRIIIISGGELNEEFVLSILEKEENQYVIGVDRGMEFLCRHQILPNYIVGDFDSVKKEIGDYYRNETNVPIREFNPVKDASDTEIAIRLAMTLGAKEILILGATGGRIDHLWANVQSLAIPFKAGIDAVIMDTQNKIRLIGGGETHLKKGETYGPYFSVFPLGEEVYGFSIKGAKYPLDNHTLIPYDSLCVSNQFQEDEVTISFMKGIVILMETKDRMINYVLAPSILAADFKVLGQEMKKTEDNGAEYIHFDVMDGMFVPSISFGMPVMASIHDATEQFMDAHLMVQEPIRYVEAFQKAGADSVTVHVEACEDVKATLNKIRECGMKVGLSINPETDVKEVVPYLEEVDMILVMCVHPGFGGQKFIPESLDKIRAIRAMLNEKNLETDIQVDGGVYVENVREVLDAGANVIVSGSAVFRGDAGENTAKFMEILKSYEMQGKIIKGIAGFYYVHVVEFGVYECKAKGVFRKEKIKPLVGDNVEIEVLDESEKKGNIVKILPRQNELIRPAVANIDQALVVFAITKPNPHFNLLDRFLVMMESKEIPVVLCFNKEDIATDPQIKELEEIYETCGYPMVFVSAKEERGIEKIRELLKGKTTAIAGPSGVGKSSIINILQPDAEMETGAISTKIERGKHTTRHSELFAIDEDSYIMDTPGFSSLYVNDYEKEELKYLFPEFREYEGMCRFNGCDHVHEPGCAVKEALEEGKIHKIRYQNYIEMYEELKNKRRYMVKDGIVLGKRYAVLSKIGAGGMADVYKGRDQMLNRYVAIKVLKKQYKEDENFVRKFRSEAQAAAGLIHPNIVNVYDVGEDRGLNYMVMELVEGITLKEYIERKGRLSHKETISIAIQMCSGIGAAHASGIIHRDIKPQNIIISKDGKVKVTDFGIAKAITSNTVSTNAMGSVHYTSPEQARGGFSDQRSDIYSIGITLFEMVTGQVPFDGETTVEVAMKHLQQEITPPSELVPDIPYSLEQIILKCTQKSSERRYESTGALIQDLKHSLVDPDGDFVVIPPIGGMTDTVIMTDKDLDDIRNGNDDEEYDTEEYDTDEYDTDTMYGNDDNDEDYENYENGRGADEVNPHMHKIMKILTIVVVAIIVLILVFTVGKAAGVFKSFGGITTQDEEDKSGKVTVPDVRGMSEENAKALLNKKGLGIQVVTRKESKKYKAGKISKQTPEAGEKVSKHTKIEVVVSSGLVGSKKAIPYVSGMSETEAQNELEEAGFKVTSSFQYDDSVESGKVISTTPEAGTKAEKGSTVTMLVSQGSNKKTVPDVRGMADATAQSTIKSYGFNVGTVTYDYSDSVEKGMVISQTVEPGTKASAGTSISITVSNGPKPEEKIEVQSFVGQQESALKSWASSKGLYTNISDSQYSDSYAKGCIISMTPSSGTVSKGGTISYVISLGSKSQDSNNTGNNGDNSGNSGNNGQNSGDGNNGGNQMKIYAMTDVGRRREVNQDYVYVTDRPIGPFPNLLTVADGMGGHKAGDFASSYTVNVLKDELKKTPMDKPEEILRSVVSIANHKLIEAASRDIKLEGMGTTLVAATVVGNTLYFANVGDSRLYLINDKIRQLSKDHSLVEEMVRLGGIKAEEARNHPDKNIITRAIGVKEDVEPDIYEYRLKKGDMILMCTDGLSNMVEDEDMFNIVKGSRDVVEAVQMLIEKANSNGGRDNIGVIVAEPLADEVSVWMSKKDICSYNYDELKEEMLVIGEKAFRSKQIYEWLHVKLADDFDEMTNLSKALREKLKKNYEIRKVKMIDHQISKEDPTEKFLFELEDGNMVESVLMKYNYGNSVCISSQAGCRMGCRFCASTIGGLVRSLEPSEMLRQIYHIQKITGERVSNVVVMGTGEPLDNYDNFVKFIHMLSDEHGLNISQRNITASTCGIVPNMRRLAEEGLQITLALSLHGSSQEKRKKLMPVANKYDLSEVLDACDYYFDKTGRRITFEYSLVAGVNDQPDDIRELTTILKGRNCHLNLIPVNPIKERDFKKPDRKNALEFKNKLEKNGINVTIRRERGSDIDGACGQLRRRHAAKSEGETDENLCNDMQASVNERELVLDMLLQITRDGEYSHIVIKNVLDKYQYLDKRERAFITRVVNGTLERMIEIDYIINLFSKVKVNKMKPLIRTILRSSVYQMKYMDSVPDSAICNEAVKLAGKRGFVNLKGFVNGVLRNISRNLDKINYPDEKDKVSYLSVKYSLPEWLVKQWLNVYDEETVKTIGSAFLEEKPLTVRFNEHKIKKEDLVGILKKEGVTVGEVPEIPCALYLSGYDHLSALPSFCEGLYQVQDLSSMQVALWSEVKEGDQILDVCAAPGGKSIHIAELLNGTGHVEARDLTEYKVDLIRDNIERSGLTNIEAVCQDATVYDPDKKKSADIVIADLPCSGLGVLGKKPDLRYKMNEKTEADLVELQRKILSVVKDYVKPDGKLLYSTCTIHREENEGNVEWFLKEYPEFELVKDKQMIPGKDAGDGFYIAIIKRVNHEMYYPMYFDPTYILVLIGVVICLIASAKMNSTFSRYSRVRNHSGMTGRDAAEQILHREGLYDVRIEHISGNLTDHYDPRTKTLRLSDATYNSTSVAALGVAAHECGHAVQHATGYVPLKLRSSLVPVANFGSSIAWPLIILGFFFNSSTTSSLFINLGILAFSLAVLFQIVTLPVEFDASHRALKILGNTGMLYEDEVRDTRKVLTAAALTYVAGAASAILQLLRILLLTGNRRNDMKVIFMGTPDFSVGTLEALIEAGHEVVLAVTQPDKPKGRGGKMQYTPVKEAALAHGIPVFQPVKIREAQAVEELRKYNADIMVVIAFGQILPKEILEMTPYGCINVHASLLPSYRGAAPIQWAVINGDKVSGVTTMQMNEGLDTGDMIMKTEVPLAEDETGGSLHDKLAKAGAKLCVETLKALEDKTATWETQGESPTAYAKMLDKKLGDIDWSKSAKAIECLIRGLNPWPSAYTDWNGKVMKIWEAKVLDENTDATPGTIVKVEKDGFSVQTGDGLLKVLVLQIPGKKRMEADAFLRGYQIETGCELSSQMIKNCMALRTIREFGDEVLNKECKEVTKMTLRTKVLINDMLDTMYEAMGVGLAAPQVGILKRIVVIDIGEGPIVLINPVILETSGEQTGEEGCLSLPGKAGIVTRPNYAKVKALNEDMEEVILEGEGLLARAFCHEIDHLDGKLYTRLVEGEVHDVNYEEEEMYADIIVDITHEKLDKVFQYRIPSHLEGMLKVGMEVVVPFGMGNKEIKGYVTGFSERAEYAPEKMKEVLKIAEESVAIESKLVALAAWMKESYGGTMIQALKTVLPIKKKEKAKEKQKVRLLLPEAEGKEKLELYLHKNQKARARLLAALLDQPEQDYDFLIHKLNLTRSVVRALEEQKVLALESEQVYRNPVIYQQKEQKEIIYTEEQQAAIRTFSKDYEQGIRKTYLLYGVTGSGKTEVYMEMIDKVLSEGRQAIVLIPEIALTYQTVMRFYTRFGGRVSILNSRMSQGERYDQMERVKKGEVDIMIGPRSALFTPFERLGLIVIDEEHEPTYKSEQVPRFHARETAIERARMEGASVVLGSATPSLEAFYACECGRYQMLRLRNRTGKQALPEVYVADMREELKHGNRSILSDRLKVLMQDRLEKKEQIMLFLNRRGYAGFVSCRACGYVVKCPHCDVSLSVHRGGKMVCHYCGYETQTVKNCPVCGSPYIGGFRAGTQQIEDLVKREFPQARVLRMDMDTTKNKGGHEKILAKFADEEADIMIGTQMIVKGHDFPNVTLVGVLAADMSLYSDDYRSGERTFQLLTQAAGRAGRGRRPGEVIIQTYSPDHYSIRMAARQDYEGFYEKEMNYRDLMGYPPASQLMAVLMTGSDENKLTTAAEYLKKYAIRVSADGEVQVIGPASPSVGKVNDVYRKVIYLKSEEYQVLVRIKNHMERYIEINRGFANMRIQFDFNPMNIFMKLTQLLERLEYEVVQGDDQIEVTELINDSRKVTEGSVFVCISGAVSDGHAYVQQVAEKGAAAVIVEKDVEAPEGLTVIKVENTRYALALTSAAYFGYPAEKLKVIGITGTKGKTTTTYMVKSILEEVGIKVGLIGTIEAIIGDKSIPANNTTPESYTIQKYFSEMVEEGCECVVMEVSSQGLKLDRTAGIPFEIGIFTNLGEDHIGPNEHKDFNEYKYCKSLLFKQCKIGIGNVDDKWFEDIFKDATCKVETFGFSEKADIRATDVKHISRPGYLGVQYHVAGLMDFDVEIDIPGDFSVYNSLTAIAVCRHFGVPVEDIKKALKVARVKGRIEMIKVSDDFTLMIDYAHNAMALESLLDTLRDYHPERIVTVFGCGGNRSKTRRYEMGEVSGKLSDFTIITSDNPRFEEPQAIIDDIVVGMKKTDGKYITICDRKEAIKYAIEHGQPGDVIILAGKGHETYQEIKGVKHDMDERVLIKEVLEELKKMKAYERLLKYVVVRTPSDENSETVPSSVCQFDLARLLEAEMKDLGLTDVVLDDQCYLYGKLPATAGLEDKPAIGFIAHMDTVSDYCDHDIKPIVTENYDGGELKLGTSDTVLSPKNFPHLESLKGRTLITSDGTTVLGADDKAGIAEILTMIERVQEEKIPHGPLCVAFTPDEEIGTGASHFNVEQFGADYGYTLDGDTEGEIQYENFNACKADFVIKGFNVHPGSSKDTMINASLVAMEINNALPSMETPRGTEDYEGFYHLVSMSGEVAEAELHYIVRDHDKDLFEAKKKTLKLIEKDMNEKWGEGTVTLTISEQYRNMAEIISTCMHLIDNAKKACENADVTPLVLPIRGGTDGCQLSFKGLPCPNLGTGGHAYHGPYEHITVEGMDKSVDVVTELVKLYAMMKNVNWKELFIDILVDIVAGMIIAVGIYNFALNADFPVAGFSGIAIILYHLFGLPVGAGTIILNVPVAIFCYKFLGKEFFLKSMKSMIISSLLMDYVAPLFPVYDGSRLLAALCMGVLCGIGYAMIFMRGSSTGGQDFISVAIKKVKPHITLGIITFVLDICTIILGTALVFKDIDGLIYGVVVTYLMAMVMDRIMYGIDEGKMTLIVTDKGAEIAEQIDAYSGRGSTILKGIGSYSKKDKDVVMCACNNKQMYTIKKMVHTIDPKAFTIIVESNEVVGEGFKEELPDIELMIKMIATDLDGTMLKNDWSVSGINAKAVETAQGQGVRWMTVTGRSYRGAMPLMQQYGINCGYVLMNGAEFRDEEGRLIFAEDMDPEKAAKVCRKLDAEGIKFEINTDHGDYATTKEMKYADFLEEGWQQIFEKKYKIRKILCFSKDTEKIKRLKQEIFEETGLSVLSSFADNMEVTAPKAQKGIMLKQVAEYYDIKSEEVVVFGDGWNDLSMIDQFPESYAMKNGTRELKERAAHITEYTNEESGVGKTVLKLLGRKNPMYNRKIKLIRALLGHERMSSAELMDKLDISQRTLRNEVKEINEILRQENVGIYSSNTGGYYLKAEEKQNVQKVLDRMIRKSKNVILPETPDERFLFGFTTLFFEKRPISIQRTAEKLFVSKTAMLQTKKEIQDACRWYHGLTIEVSSKGSRITGPEKIRRHALAEIMNYYTYGAILMERVITFLFGSEKYEDYIALYKALPAILQQYGYRLIDKAIEGFALDIFVSLMRREKGFELEEDAGDYETWPCVEEICRFLEKKEYDIPKQERSYMAECLRAKRILYTQGKTYEVPEEYTEITKEFLEIVDRKYHTDYRNNEELFTRLSVHIGKMIERIEQGYFETNPTLENVLEYYEREVRMAEELNQILQEKYQFIANVHEICYVAIYLKAYDFQRLKAVILCDIGESFADNMARQITDYCGEKIHILEKMSLAEYRLDPVPVDLVISGSRVYGVEFPKKTKIIYVDYLLKEENLKAIQEYLMKEGTDYDKDDCNMDRNQIKVLIRQMTLEEKAGQVTQLPSRYFAIQGSQLTGTETKLGISEEKKWLCGSILGKLDAVSMRNIQKENLERSRLQIPLMFMTDIVHGYQTIFPVPLAMAGSFDPGMVRECARISAKEGSAAGYQVTFSPMVDVVRDPRWGRVMESFGEDSKLNCDFGKAMVEGYQGENLKDPDRLAACVKHFAAYGAAEGGRDYNTSDVSEFRLRNKYFPPFKACIDAGVKLVMAAFEALNGIPATANPWLLQDILRKDLEFEGTVISDWGAVLELIKHGVAEEEAEAGRLALESGVQIEMATAAIVKHIEVYVKKFPHLEAILDEAVEKVLILKNELGLFEDPYRGVDPEREMRELRSPDKKRAAFHAATESAVLLENNGILPLTKETPVILTGPYAESKNILGPWSVDGIVEDAITVKDGLILKGGRIKEVIQTAYEEVTEQDSDRIVQTVASGDVVVLALGEPELWSGEAGSRSVIELPEHQISLLKKLHEHQIPVVVLLFNGRPLDLRKVKEYADAVLEMWFPGTEGGNAAAALLYGEKNPSGKLAMSFPYGSGQIPVSYDMAPTGRPKADLVQEPRYKSQYLDIPNEPLYSFGYGLSYTEYDVQVNGKIVRQEQEYLVPVKVTNLGNMTGKTVVQIYIGKKKSLVARPVKELVAYKKIELQPGKSKEIVIPIEEKTLERWIPGKGWTKEKGEYTILVSNDGRNFQRMELTVGMAKETDYKAVAQQIIEVVGGPENIISVAHCATRLRLIVKNREIIDDKQVEAIDIVKGCFFTAGQYQIILGTGIVNKVYDEVMKLGIEGSSKNEQAAAAAKRGNKLQQLIRVFADVFVPIIPVMVATGLFMGLRGFLTQDALLAFFGTSADAIPKQFLEFTQILTDTAFGFLPVLVCWSAFKKFGGSPVLGIVIGLMLVSSILPTSWDVAQGNAKPLIFFGFIKVNGYQSSVLPAFIVGFLGSKIEQWLHDHVINALDLIVTPFVTVLVSLCLGLFIVGPIFHSVEVGLVSIVSALFSLPFGIGGFIWGALCQVIVVTGVHHALNLVEIEMLAKTKWNPVNPVGSCGIVAQAGAAMAVAVKTKSTKMKSLGYPSAISALLGITEPAVFGVNLRLVQPFVCACIGGGVGGWIAALLGLKGTGMSITGIPGMLLYLNKQMPLYILVNVIAFAVAFVLTYFFGMKQDVAEAEMGMRPNYHISPKHGFLNDPNGLAQFQGKYHVFYQWLPDVVPQGNKIWRHCVSEDLIHWSDQGCGLKPEEWYEKNGCYSGSGITEGDSYYLFYTGNVRDSEGGRETYQCLASSSDGVNFHKEGPVVYLPEGYTPHFRDPKVWKKNGRWWMVVGAQTKELKGNVALFVSDDLKKWQWKGNMLDSSMDWGYMCECPDLADMGERQFLIVSRQKEDGCKGMVFAGIMDYEQGRFHISEDTGVLLDEGFDFYAPQTFTDESGRRLLMGWIGAGEIEYQMSQPTVKEGWLHVLTIPREVYVKNDRLYQKPAEELKHLRKNEESICGTGEIAIDRHSKCMEILAEGLENQTITFDFGKVIKFLYKKESGNLLVFRKKWNGEGYDEKEIHLDKLEDFRIYLDQSTAEIFLNQGEKVLTMKSYFTEDTLIHMNSELQIKVKTWLLEEEMNILRKGFIYGGDYNPEQWLDRPDILEKDIVLMKKARINTVTLGVFSWSVLEPEEDHYHFQWLIDTINRLYENGIQVILATPSGARPRWLAEKYPEVLRVREDRVRYHYGERHNHCYTSPVYREKVRKINRKLAETFRNHPAVIMWHISNEYRDECHCPLCQKAFRVWLKKKYHTIDALNHAWWTTFWSHTYNSFDQIESPSSIGDKGLHGLNLDWKRFVTEQTTDFMCHEITALRDAGAMQPTVVNFMDDYKGLNYYRLAQHVDYISWDSYPAWHKDSDIHTAYDTAFQHDLMRSMKQQPFLLMESCPASPNWQKVSKAKHPGLLMNASLQAIAHGSDSAQFFQIRASRGSFEKFHGAVIDHYGGDDTRIFREVTDTGIALQTLTAADVPASSVHAPAAVLYDMESRWAMEDAKGPRNEGLFYHEAALKSYQAFRKNGLNTDIINMDQDLTGYQIIAAPMLYMFRSGIEQKLRTFVQNGGILIMTYWSGIVNETDLCHLGGTPHHLIDVLGIRSEEIDGLYDNQCNHMVPASNNFMTLPATYLCTHLCDLVQLKGAVPLMQYADNFYAGYPALTVHKYGDGLAFYLCADAEDTFYYDFYRQIIQEQELPVIMDHIPEGIEVSSRSSGRQEFIFAQNYTDSPIPFTLPGHAQILFGKYDGTIKEYSTLIYQMEVKSMSLFKRKSKDTGNDVYAFISGNTIPITEVNDPVFSAKTLGDGLAIIPSGELICAPCAGTISMVAEGSNHAVGMTLANGAEILIHVGLDTVSLNGKGFKILVKEGQKVKPGTKLLKFDKSFIESEGFDTACVFVLTNCEDFPDVRFFTGQDVVQNETVICSFMRIIFHIDVNSAYLSWTAVEQLKNGAGVDIRTIPAIIGGDQKSRHGIVLAKSISAKKYGIRTGEPVANAFRKCPNLKTYLPDHQMYREYSRKLMEFLRTYTTHIEQVSVDECYMDFTEIADRFTSPVEGASEIKDEVYKRFGFTVNVGISSRKVLAKMASDFEKPNKVHTLFPEEVPAKMWPLPIGELFMAGRSSVETMKKLEIYTIGDLANTDPAILELHLKSHGRKLWEFANGLDDSEVESVRAEAKGVGNSTTLPKDLITEAEALPVLKDLAVSVGRRLRKAGQKAGMVSVEIKYHTFNQVSHQKQMERQTNQDQDIYQASIELFRELWSGEPIRLLGIRTSKLSEESEPEQLSLFDMKFESEEMRKKKKNLKEALKKLEGKYGDGIVKKGWMNINKFTQKSLQAVQNCERIAMDYGNQEIAQEHLLYALLTQDDSLIAKLMEKMGLDKNLIINRVEEAIQKRPKVQGGQQYVGQDLNNALVHGEDEAKAMGDEYVSVEHLFLAMMKYASKDMKALFREVGISREGFLQALSTVRGNQRVTSDNPEDTYDTLNKYGTDLVERAREQKMDPVIGRDSEIRNVVRILSRKTKNNPVLIGEPGVGKTAVVEGLAQRIVRGDVPEGLKEKTIFSLDMGALVAGAKYRGEFEERLKAVLEEVKNSDGRIILFIDELHTIVGAGKTDGAMDAGNMLKPMLARGELHCIGATTLDEYRQYIEKDAALERRFQPVMVEEPTVEDTISILRGLKERYEVFHGVKITDGALVAAATLSDRYISDRFLPDKAIDLVDEACALVKTELDSMPAEMDELNRKIMQMEIEETALKKEDDRLSKERLEHLQQELAELRDEFAGKKAQWDNEKVGVERVQKLREEIEQVNKDIERAQHSYDLEKAAELQYGKLPQLQKQLEEEEAKVKDEDLSLVHESVNDEEIGRIVSRWTGIPVAKLNESERSKTLHLGDELHKRVIGQDEAVELVTEAIIRSKAGIKDPTKPIGSFLFLGPTGVGKTELAKALAENLFDDENNMVRIDMSEYMEKYSVSRLIGAPPGYVGYDEGGQLTEAVRRRPYSVVLFDEVEKAHPDVFNILLQVLDDGRITDSQGRTVDFKNTILIMTSNIGSQYLLDGMDENGNISQESQNAVMEDLRAHFRPEFLNRLDETIMFKPLTKDNIYDIIDLLVADVNKRLADREISIFLTEDAKKYVVDGGYDPNYGARPLKRFLQKHVDTLAAKLMLQGDVGAQDTIIIDVEDGKLVARSQSVCEMMMPSILGENLFDDFMNDFRLPAFPDVDKELYGKHAKNLMKTDVKETEKGYEVDMDLPGFKKDEIQMELNDGVLTISAAKGLNKDEEDKKGNYIRKERYAGSMSRSFYVGKHVTVEDVHPKYENGILSFSVPKEEAKPVEEKKNYISIEGMILYFSATGNGKYIAEQIAEKTDEKCMSIVDCICEDKYCFSNEKIFGMVVPTYFWRLPRIVAEYLGKLRIENCGYTFFLTSYGATTGEAGSMAKKIMAHNGQNFDAYYSVIMPDTWTPVFDLTNKNRVDKWLSDGKKQLKLVIGNIMSKRKGNFVDRKLYSRKPELMLDCNYERHGYGKMFLAKEQLSKEEALQAVCFLLGSVEREAHRKMILGFILLFLIMIIGGDRGVISLISLVGNMLLLSLAIWLMAAGAPVLLVTVGVGIIISCVTLFYQNGTNEKTKSAFTAVLITMAVLFFFIYMVVWRSEAGGLNEIQAAEDDVLYYNMNLDINMRNVATAVIILSTLGAVLDMALTVTTSVYEISIHKPEMKLTELVESGMQIGREVIGTTVNTLLFAYLGESLLLFSYLKMQDYTLETLLNSKILFQNCVSMIFGAIACVVVMPVAAVLVGKRINIVMKQVATKITEYVKKSKRAKLYGVFGLIYLIAVIFVMNDAWLYQTPIAKLTKVETSIAGENKSTRGTQEIKYKQKIRGVILNGTNKGKIVDFSNEYTYTGMLKQKYHKGDKVLLNGSESNVGSSIQSVKRDTELVVLLGLLIFALMTIAGKKGVLTIITVGINIVIFSVGFLKSGDDADVVAICNKMVLFFAIATLIGLNGLHRKTWAALLSTLCILAMIMGIFEVVISHTAELDYSTMEYLGSIDNPDEIFHAEILLSGLGAIMDVTVAIAAALSEIVTKRPEVTFRELFRSGREIGYDIMGTMINVLLFVFGCGLIPMCVIRMNNSVRFMTIIKLHIPCELCRFFIESIGIVLAIPVSILITSVMMKLTIRKVKKICMDYSWRLYALLYDKYSWMCKKESKKITTGSSVDKIVKEKTEKKETQNTKRKETKKRQEENSQESKEQGGQQTPGSDVDYDLTNMNKDMVYATFYQLMVEPDKYIRKTLCIDGLYYTGQNEKTGTYYHYSIIKDALACCSQGLEFIWGDVSHVYPDEYPKDETEIEVKGTFETYKEPGDDTLYCHLVNSEMQVKMSVICAVIGILLSILAGTPVGSTIVAADMAAFFISCVAGRMMGRRMTTEKRKHLAAWFSIIFIFVTLASLFYIVKEENHKCTGEDCPVCACVMAKARYKTKQMTELHTFLQSVQGQHVTVQEIREYFKDREIAVGTTTIYRQLEKMVKEGLVEKYVVEGTNSACFEYIGESETSDYESCYPCKCEKCGKLIHIQCDEIECLSRHMTEHHDFQLDPKRTVFYGICNECRKNTMVKRIITISREFGSGGRFIGEEVAKKLGIAYYDKNIINQIAEESGLSPDYIQESAELSPKKGLFAYAFAGRDITGKSLEDMVYEAQRKVILELADKESCVIIGRNADFILKDRDDVLNVFIHGDMPEKIQRISRLYHVNEQEAVKLIADTDKRRMTNYNFYTGQKWGKASNYTLCLNSSQLGYGRCEAVIMECRMAESNKMKDMPVNKLMIQMGIPMILSMALQAVYNIVDSAFVGNMKTGSEAALNALTLVFPVQMLMVAVGIGTGVGTNALLARTLGQGNSKKAAKVAGNSLFLGVIIYVVCLLFGIFGVKAYISSQTTDAEVLEMGVSYLRICCVISFGIIFFSLFEKLLQATGRSLYSTIGQVVGAVVNIILDPIMIYGIGPVPEMGVKGAAYATVIGQIASAVLLLVFQIKLNKEFEHDVKYMKPDVGIIKEIYAIGLPAIIAQALMSIMVYVMNLILKFNPSAQTAYGLFYKVQQFVLFLAFGLRDAITPIIAFAYGMRSKKRIQDGIKYGLIYTVALMILGIAITEIFPGAFATLFNAGQSRAYFISAMRVISLSFLFAGINVAYQGIYQAVNSGMESLVISLLRQLVIILPLAGIFSIFARNGQMGVALIWWAFPITEVIACLVGYVFLKRIRKNKVLKMIQIRPVSDLRNKFPEIETIVNSGNPVYLTKNGYGSMVVLSLEEYASLTDNVEMKLDEADRQAAATEERLSHESVFKNVRSVIHGKMNDKADFTQGSILKKLIAFMMPVLGALILQAAYGAVDLLVVGRFGSTSGLSAVSTGSQVLNLVTFVVIQFAMGITVLIARYLGEKRPDQIGSVIGGSAVVFTMIAACLFIVMVGFAHPISVLMQAPKEAVDLTSVYVRICGGGIFFIVAYNLLSAIFRGLGDSKSPLLFVFVACIVNVIGDLVLVAGLHMDAAGAAIATVTAQALSVVFAVILLIKKKLPFKITRKDFSLNSQCKKFLKIGLPLALQEFLTQMSFLALCAFVNRLGLEASSGYGVACKIVNFAMLVPSALMQSMASFVSQNIGAGKTKRAKKSMFTGIGVGLVVGCMVFLLVMLKGDMLAGFFTTDAAVIQKGYAYLKGFALETIVTAILFSMVGYFNGNNKTVWVMTQGLIQTLLVRLPFAYVMSIQPDASLTKIGLAAPVSTMVGIVLNVGFYIYLGKQEKKISKKMTSEIIKRMFDACYQAKRTRDMLPPLPEGVRASFIQYLDVIQSLERKGIQVKVSDLSDAMELPRPGVTRTVKEMEEKGYLQKIASEEDGRVTYITVTKKGSELSQKYDEQYFDSLLPYMEEIPDEDAECMIQTIEKFYQIMCERRKHYDERMKDVAAYIAGKGCRQPAYITADISISPSKERYEGFVEGLEENGISFNKRMHYAGTFSVETGQIGAMTLLQRNPEIDCIVCGNDLMAIGAVSVCEKLGKKIPEDIKIMELLTGKYKKGQPYPEGSRATHQADKQINNLLTDENLAIVDELSKVADDLGTNVAILSLAWILKHPEISCVIAGASKPSQLENNLKAVDLEIPDDAMERIEKILGFQRFERHVGMMTREEALAYGMSFYNVYEEKPFRDPNWQLVRIKGSKKTFLWIYEREEYINLNVKVNPEWRDFWRSAYESVTAGYHLNKEHWNTIILDGTIPEEEIKRMIAESYDLVTDSPTKRIYEAVKRIPKGHVATYGKIAEMAGEPRMARAVGNALHKNPDPEHIPCFRVVNAKGELAGAFAFGGQNVQAELLRADGVEVINGRVDLEKYGIMLDFRTDTFLTVCETMNFTEAARRLHITQPAVSQHIRFLEKEYNTRLFSYCNKQLYLTPAGEILRKRLMTMKNDQLAIMNEIRNESHKMESLSIGVTMTIGEYAIVDKIADFMIGHPEMNLHIHYGNTTQLLTLLDEGIINLALVEGNYPKENYEHKNYSTEEYIAVCARDHIFEVKSPETMQELVKERLLVREPGSGTRNILEELLLARGMGIKDFLHYTEVENMHTIIGLLKRDCGISFMYKIAVADELKNGTLKEIRLSDFKMQHDFDFIWEKGSIYTEKYIGICEELLKKYMNFLKKNLNGILVCFVIAVPSWLLGKTFPVVGGPVIAILAGMLITLVWTNKGKAESGIKWTSKIILQTAVVLLGFGMNLGVILQTGKQSLPIIVCTISTSLIIAWLLRKIIKVPSNTSILVGVGSSICGGSAIAATAPVIDADDTEVAQAISVIFFFNVIAAVLFPVLGSALGFDTTGGGSFGLFAGTAINDTSSVTAAASTWDSMWNLGSETLNTAVTVKLTRTLAIIPITLVLSLIRARSASKAGTADSSANKFSLKRAFPMFILYFIIAAIITTVCMSMGVSADVFAPLKELSKFFIIMAMAAIGLNSNVVKLIKSGGKPLLLGACCWVGITIVSLGMQHVMGIWMAKLLLGKEVNASINEEIKAKVETLKAQNITPTLGIIRIGEREDDIAYERGATKRCETLGVAYEKFLLPADAEEEEVLKTIDQVNKSEKIHGVLLFRPLPKHLNEEKIVNALAVEKDVDGITDLSMAGVFMGKDMGYAPCTPSACMKVLDHYGIDCTGKKVVVIGRSLVVGKPAAMMLIKKNATVTICHTRTVDMPSVVKEADIVVVAAGKAGVIDGSYLREGQIVIDVGINVNEEGKLCGDVNFEEAEKIVEAITPVPRGVGGVTTSILLEHVVDAAIAQNRMENPNRNFKSQTCEDFIEVLASKAAVPGGGGASALAGAIGIALGNMVGSLTVGKKTYADVEEEIIECKKQADEIAKEFLELMDKDAEAFEPLSKAYGLPKSTPEELAKKEEIMEEALNTACSVPIEIMKTCARGIDLVEVFAAKGSRIALSDAGVGATLLKSAMQGASLNVYINTKSMKDRRKAEELNHLADSLREEYEAKADRIFAEVNSRIRMNLHEFLIVCPLVFLAGFVDAIAGGGGLISLPAYMFAGIPVHHAIATNKLSSATGTAVSTWHLVKSKCVDIFLVPGTVACAFVGSIAGANLALIISDKVLKTVLVFVLPVVAFCVLRDKDLKPVIPEGFTRKKQYLIMAACSFVIGIYDGFYGPGTGTFLLLAFTKLGKLDMEKATGNVKVVNLTSNISALITFILAGKILWVLGLSASVFSIAGHYLGAHMVVKNGVKIIKPIILLVLALLLIKIVLGIMDYADRGKLGIVYGDVTLGVHGEDFHLIFSYQTGGLESMVKHGKEWLYRTPKPTFWRATTDNDRGNGFPFRAGMWMTADMFQKCVDIQVRIDGTKIEKPSAPVNNKYSDKETAERVEVIFTYETLTVPSTQVKVSYLVFADGNVRVRAHYYGKEGMPELPAFGMRFVMPTKADGFVYEGLSGETYPDRKAGGIHGIYEVEGLPVTPYLVPQECGMHMDTEWVTVKRSTVLDNRNRHIEQSGLTFRAGSEINHSTFAFSCLPYTAEELENATHQEELPPERRTVLCIYGAVRGVGGIDSWGSDVEEQYRIPGNKDIEVEFIMMKADIRWLDDPQVFRVNRLDAHSDHKFYENKEDYKKQNQRLKQSLNGIWKFHYSVNALERPADFYQKWFNCKNFDEMKVPQHIELAGYDKIHYINTMYPWEGHIYRRPAGYGKEKGKGMFSQAEYNPVGSYIRKFDLNDGLRGKRIILSFEGVEQAFYVWVNGEFVGYAEDSFTVSEFDITPYVKDKDNLLAVEVHKRSTAAFLEDQDFFRFFGIFRDVNLYGIPAVHVEDLWIRPKYHPEDGKAELELDIRLSQKKKENNIQGKIKVSLRDIYSDENHVLLDETENLNNPVIQKNLPVEGSVNNEIQFRYELEESVHAWSNEDPYLYELLIEVQNEKGETVEVVPYQIGFRKIELKGRKMLLNGKRLIINGVNRHEWNARSGRCITETDEKWDIECIRRNHINAVRTCHYPDHISWYYRCDQAGIYLMAETNLETHGSWLKQGVIEPSWNVPGSIGCWRGCTLDRAVSNFESFKNHVSVLFWSLGNESYAGDILVEMNRYYKEKDPDRLVHYEGVAENRPYEDLISDMESQMYAPPEKIKEYLENNPKKPFILCEYMHDMGNSLGGMESYIRLLDQYEDYQGGFIWDYIDQALFVKDEVTGRDVLRYGGDFDDRPSDYEFSGNGILFADRTEKPAMQEVRHYYGLRRMKEITKETLLKAMKSRDAGEHPVFRECEFKDMDLNGMDLHNMDFTLSSFQNVNLERVNFENCSVENALFDGNSLHGANFQNANMKTAAFRGCDMRECNIKGANLYGAVLEHAKLDDIQSDEATQWFRMHCPETGPILGYKKCVNDRVVQLLIPADAKRTSATRPSCRCSKAKVLSIKNFDETEEFEEAWSLVDENFVYRKGQWVEVKDFNEDRWMDSTTGIHFWMNRNEALGYMGKIILTGDRPTGRLHVGHYVGSLKERVKLQNSGEYDEIYIMIADAQALTDNAEHPEKVRQNIMNVALDYLACGIDPEKCHIFIQSMVPELTELTFYYMNLVTVSRVQRNPTVKAEIQQRNFEASIPVGFFCYPISQAADITAFRATTVPVGEDQMPMIEQCKEIVHKFNSVYGETLTEPEIVLPSNKSCLRLPGIDGKAKMSKSLGNCIYLSDEEDVVKKKVMSMFTDPNHLRVEDPGQVEGNPVFIYLDAFCKDEYFEEFWPEYKNLDELKAHYQRGGLGDVKVKKFLNKVLQAELAPIRARRKEWEQKLPEVFEILKEGSRVAEAKAAETLKDVKAAMRINYFDDEDFLNMAAKRDYYDVLGISRSADKSTIKRAYRKLAKKYHPDTNAGNAQAEEKFKEATEAYNVLSNPEKKKLYDQFGHAAFDGSAGGSGAYGYGNGSGGGTYSYTGPNGSFHEYHFEGGDMDDILKNIFGGGFSEGSGSGFHGFGGFGNSGSGRTRTSGRSYESSGFGNGFGNHGFDGEGNFRQDGSDVTAEIDVTFDEAAFGGDKVIRLSDAQGSNAAGKSLKVHIPAGISDGKSIRLRGKGMPGLSGGKAGDLLLKVRVGKRPGFERKDMDVYSTVMIPFTTAVLGGEAVVQTLTGRVVCKINPGTQSGTKIRLKGKGIVSMKDAGRYGDQYVTVQIDVPKNLSNEAKRKLKEFEAACKNGSRGAAMMMPSIFGENLFDDFMNDFSFPTFPNVDKELYGKHAKNLMKTDVKETENAYEIDIDLPGFKKDEIQMELKDGVLTVSAAKGLDKDEEDKKGNYIRKERYAGSMSRSFYVGKHVTVEDVHPKYESGILSFSVPKAEAKPVEEKKHYISIEGMIRFFLCICKSVMENHYNLLYREDERELIPICKQMNVSLMPYSPFAAGHLARPTWKSESLRGRTDRVAVGKYDRMEDADMKIVTRVHELAEKYQCKMSQIAIAWQWAKGVTSPIIGATKMQYLNDAAGALNVRLTAEGIAYLEECYVPHPIVGAIDKNPAQGVMLLDEKKMSLERAKKYLEEKGYADHVIELEESSATVQLAAEALGVEQGMIAKTMSFLVDGEPILILTEGTAKVDNRKYKDQFHVKAKMIPFDEVEEYIGHAPGGVCPFGIKDGIKVYLDESLKRFETVYPAAGNDHSAVRLTIAELEDVAGACGWIDVCKEMMENELFEKAPVHKAYFNMALPLVFSMVISLVYNMVDTFFIARTGNTNLVAGVSLGAPMFTAMIALGDIFGLGGSSVIARLFGQRKDEDAKRISSYCFYGAIICGVIVTVLLLIFRAPMLHLLGADANTYKYASQYYTYLVLGSVFIIVSFTPNNQLRSEGFSKASMEGSVLGAVVNIILDPIFISVLGMGAGGAAIATIIGYIATDAYYVWIYLKKSKKLSIDPGHMHINMQEFRQILAIGIPASITNFMQSFAVTVTNRSLLVYGNNKVAAMGIVMKVNMIAALILVGFAFGCQPLVGYNYGARNKKRLKEILAFCYKFECGLAVILAVILSAGARPLIRVFMKTQEIVDSGVLMLRLQQAGMMFMAVVLVTTCVFQSAGKAMGAFLLSVSRQGVIYGIVIVIASHMIGYHGVLAAQAVSDFLTALMAAILLKHELWSELTDIKRNEEAVMKMWISGSAVSWKYTDIYEKIYNKIWKYSCDKTESLLMAFTAMISWGFYSAIIKKIGEWDYPTAAVTRRIYFYGMLFLIPVLMWQGVSWDVTVVLSVVILHEKMTFVSVTGALLILLGLIVSQKKINQKKMFQYYLIHYFNFKNAGGFMLVSLLCLIAVLAIVILAAKLKKHYKLNTQDLTPKQIRKLNHIHKVKEISLIESFYEMVFSSTSVLLFLSLYYIIDERIPQAAFYWQKYQNIILLLFLVFSVFMTNWFDILFVPLTAIPTRQKASVRLISAFYIILILLYIKFIYHDSNYDSLIMYFITLAVGRFLYFDSTLEDIKETLQGVARNLPLLVLMGSYSAIVCWYGFHCGFLLTSNGVILSTLLAHLFMDVSIFVLDKTQLVKLFIMNGFTPNNNTNVIRLLSEAIRKCNKSRNRILMGAVVLCILTLTFVFGTAYGKINAEYTKNIRMDGTTASTYIEEGTKQQYEKARSLGYVRETGRRMKMGEATESGKKESICSIQVLDQTAWEKMMKPAYTGVHGTYPKKQQEIMLPVKTLKKLGIDNPKRGMEIALDISISFFQTEKEEFKLSGWYSAYTEDNGRSKAIGYVSEKKLKDWGYDIEEGSDILICQSNAMDWKDTEEKLYEDVPMKDNSQQIIATDTAKNRAVKEMTGSYGMAVVEAVVIICGIFLLVYNVMQISMSGDIRQMALLHTIGTTKKQIRKIYIRQIMRTIVPGCITGTVLSVLLLRYLIPELVGRQYLNGYGGAEELQIFRMEILLLSVAFTLLVILGASEQVIRQTVNRTCIEGMHYTEQTGRKKRHRRRTDLGKGTFNKKKRSETQELCFMAWKNVTRYRQRFVITVISMFLGIEMFLIVMVITTGSDYANIINQRPDFLIAGEFSEFAQKEGSGTEYQTQSPDQDPLKSEGDSFELLYDNEYDEFSPISEKVRNRLWNLDGVKKKKSYITEGAYMLSSISRDGVRPLEKDTYLGKNVEYAEESSTDYESGAKMIEGLDADTVQIVSENELKALKTYVEKNKLKVDMDSLENGTGVMIIHDHKLSQKQGRQAEKAVGEMVCLSPLKNKETCIRWNSMTDKERDKEDEIIKAETPSTEYTLSGYLDNQADDFPEIHQTWHGAEGDIYYLVSEKGFNRLPTKRKTFCMELNVEKKKEKKIMYEIQKILSAENQRRKSNTQTSLDGEGEAGIFYIARSDLMQKNADYIRGNRIMFGSISVILLCVGLVNYFNTMFTGIVGRKKELEIMRKIGMTRRQERKLLLLEGSYYVLLIAGLVASVGSIILKGINVYMRKQLSYFTFHYPVGAIAGSIVIMEIMCVIICNLLILKKMEMIKAAGLKKYYVTDNYEVHALDGVSLSVEEGEFLAIIGTSGSGKTTLLQILGGLDEPTAGGVWIRGNSLKDMTEDERTIFRRRNIGFVFQQYNLIPVINVYENIVLPLRLDGAEIDEKLLEDIVRTLKIGEKLENLPEELSGGQQQRVAIARALMVKPAVLLCDEPTGNLDSVTSMEVISLLKTCAARFHQTVIVVTHQEAIAQMADRILRVEDGKLYNAEVMNIIIIVVAVTAGVILGGTAIYVYQGKCRQKELKLLAECMEKILREEKIRETKAGEETLYARLESRLVRIQEMLNGRTEAAEKSKDEIQKLISEIAHQMRTPLANIRTYQELLEEEWSKTGTKTDENVDNYLNAMRSGEQQLEFLTEGFVKMSRLEQNMIQVRKEETDLLKTVRNCLGRIQKRAEEKQIAFRIELPQEVNCPHDANWIGEAIDNVLDNAVKYSRPGGIIEMRIQKNEMHAKITVKDNGLGIEKGEEHKIFQRFYRGKNVTTQKGYGIGLYLARKIIGLHGGFMIAKNRYSEKGLMIEINLPVCMTIGIIEDDTLLHQALKTALQNAGYQTVSAYTKQEALTTITGSESLLLIDIGLPDGNGLACYKKIREKAEIPAIFLTARDEETDMLTAFDTGADDYVVKPFSMKVLLKRIEAVIGRNNREKQLVCGEIILFPDKKQVYKNEKEIILTAREYQLLEYLMYNQGNVLTKENILEYVWGLGGQFVVDNTVSVTINRLRKKIETDAGSPIYLKNVFGLGYKLECVMERDLTTGSVFKTVIYFSLPYLLSYFLQTLYGMADLFIVGQFGGVSSTTAVSIGSQIMHMLTVMIVGLAMGATVMIGRCIGAKDYKKASETIGNTATMFMGIAIILMIVLLAAVRPIVSVMSTPAEAVEGTIRYLTICFIGIPFITAYNIISAIFRGIGDSKSPMYFIAVACAANIGLDYLFIGVMGLDAAGAALGTTIAQAVSVIVSLTVVIKKGTGIKLRKSDLRPKRHTMKNILKVGVPVALQDGFIQISFIAITIFANQRGLNDAAAVGIVEKIIGILFLVPSSMLSTISALASQNIGAGKHDRARLTLRYVLCMTVGYGLVAATIVQFVSVPFVGLFTNDGAVQILGGQYLRSYAWDCVFAGVHFCLSGYFYAYGLSIVSFIHNSISIICARIPLSYYAATHFPDTLFPMGCAAPAGSIISIIICVGVLIWMNKHTEKYMERTMDNIIVSFNVIAPVFFLMVLGYFLVNYTSLADGKLTKQANAIVFKIFLPCMLFYNVYQSDIGSEIHSRIRLCIWAAGGLLILFVLLCLIVPRIVTQENQQGVVIQGIFRSNYVIFGVAVVQNMYGPKSTMTAAILSAILVPMYNFLAVVALSIFGEKRENDWKKIILDIIKNPLIISSVLGIIFSLLGIRLPTAVNTTVQDLAKLSTPIAFMILGGDLDFSKVKGNLKTAFVVLTIKLVILPLIMIPMVVMMGYRDADLLSGVLAYQTPVAVSSYIMAQQAGADGQLAGQLVVFSSVLSIFTLFVTIFILRTMGLLAVMRYDFTKIIDRHGKDAIAVDGLGKNPGFAPEPPKDGFDVIPMWVADMNFETVPTIPKAIMDRAAHPAYGYFSPVEEYYDSIIRWHKIRNNVEGLMPEYIGYENGVLGGVISALTAFAAPGDAVLLHSPTYIGFTKCITENGYKIVHSPLKKDEKGIWRMDYEDMDAKLKANNIHVAIFCSPHNPTGRVWERREIEEAMEVYKNNECVVIADEIWSDLILKGSQHIPTQSISPDARNRTIALYAPSKTFNLAGLVGSYHIIFNKMLRDRVEAKSRKSHYNTMNVLSMHALIGAYEAEGYTWVNELCQVLSENVDYAVNHIRDYYRGIEVSKPQGTYMLFLDCEDWCEENYKSLDELLKAGWDVGVAWQDGRPFHQKYGIRMNLALPLGRVKEAFERLDEYVFHVMKETNNVEQRPRTSLSKGARRNQILRRITVVGVIAAVITAAFAGYSLHRECVEEKQKAEELRKEKQDKKEAAKVKSKPETAEQKLERIRKQATEHGYPKNVIELLDKNVETVDFVADYEKKKDKPYADTIGKDLSQGGIPELLQWDERWGYAPYGTSIVAASGCGPTCMAMVAAGLNQDASITPAKVAAYGTEHGYVDEENNTYWRFMDEAGANWNLNSTAGLLSEEQVALELSQGHPIICSVGPGDFTKIGHFIVLTGYENGNVKVNDPFSIKNSKATWVFANIKDQIKAMWVFSKKMRTRIPGAVGTLFALDMAVKQYIEENVSETEEKSLCGTGILIRKVYNKGFAFNSMDSEPEKVKKASVMTTAAIGLLTIIEAFREGHMLSKIALTFLSAGALSNTYDRVVRGKVVDYIGIKSSHKILGNITANLADIYILLGSVFAFLKKKIDMADFFEEFGRMVSDVASDITKKTGDTLEIQKIKSNVRSLKRANERDLADIGRMVYEKFQSGEVSDMDYVTLCEEIEKRDEEIEKQEEEIVKIQGEVMYMKGFFDLEENCKEKIISEDYWDFIIPLYRDEELKEVNPENACIQEMDFGYKSVSVDRRILLPLSFREYWYSTIPKCYTLLDMQPLDAAGIITLQNYPTLQLMGDGIMIGFLDTGIDYQNRVFRNLDGTTRIVGIWDQTIQTGRTPQGLYYGTEYTEEMINAALRSEDPLQIVPSVDTDGHGTFVASAAAGGAEVGKQFLGAAPEASIAMVKLKPAKNYLKEFFAIAQDAVCYQENDIMLGLRYLNDLARKQGMPLVICVAIGTSFGGHNGDSILADILDIYATVRNRCVVVGTGNEAARRHHYFNRFTDAQDMRTAEIRVGEGTQSFAVELWSTLPNIVMVSVTSPSGERTGMIPIRLGYLFDFLFTFERTTITVEYRLLQRNNDAQLVFIRFQNAVPGIWKIDIKPAMQTTGDFHIWLPMEEFLEGEVYFLESNPDTTFTEPSGGRNTMTVAFYNSRENGVDINSGRGYTRDEKIKPDYAAPGEAVTGAVPGGEFKNRTGSSAATAIAAGGCALIMEWISEQPGARGVSSSQVRNIIVMGTQKLPGIEYPNTQWGYGTMNLYRSLDILRQLMQENKNKYYDIAERIYDLDGEVYECVGSSLGRTFTGDKRTCVNNLVMLMRTKPQGHLLRSELALISNMARTIRKDEDRSRLMKKYDEILKEIAELPASFGKVEILDENRAKLNTANLRQKFSKDDHLIICIGRTQGSAGNDIGFALADALRINYYDAEIFNEVLRRLDAEKDSVTDVADLGTDLIENKYQGSGRTIKERLKDFDRYHGLTREDAIFFNQSDLICKMAKEEDFIVMGRCADVILANNHIPHISIFITAPFEQRVRRIMEVNDLDHKKAVRLLKKLDRQHARYYNYYTGQKWGDAMNYDICFNSASYGIEESVDIIERMLNQNTNSMGELSAIPIWLCIPFAGLLLSIAVMPLFKPDWWEKHQPLAVAFWSILFIIPFTAKYGIFTMSETVLECVVNDYLTFIVLLFGLFCVAGNITIDGEFAGSPRINTALFVFGTLLSSVIGTTGSSMLLVRPFIKMNSWRKRKSHIMIFFIFLISNMGGCLTPIGDPPLLMGFMRGVPFFWSMKLFHILVFNMVILLVIFYFLDRRAYRKDIAEGRKPDIREPGTHFKIVGLHNLIYVAMIVGAVILSGTLPGMSAFQNADGTVKGLHILGEVTLGFPSIIEVVIILLAAFLSFKTTNEEVRIRNHFTWGAIQEVAVLFIGIFITMQPALMILKANGAELGISKPFQMFWATGALSSFLDNTPTYLVFLTTAGALGFKGGVATTLGAVPVKMLEAISCGAVFMGANTYIGNAPNFMVKSMSDENGVRMPSFFGYMAWSLTFLIPVFIIDMLIFFLMANQDDNNNQEIEKVEDVEVETIKNTSDTDNKKQNNDDGYEKVCFICRRPESVAGKMIELPNHICVCNDCMQKSFDAMSNGPIDYSQLMNIPGVQVFNMADMEQSIPKQQKIKKKKEGEEYKPLVDIKNLPAPHKIKAKLDEYVVGQEYAKKVMSVAVYNHYKRVATDSMDDIEIEKSNMLMIGPTGSGKTYLVKTLAKILDVPLAITDATSLTEAGYIGDDIESVVSKLLAAADNDVEKAEQGIIFIDEIDKIAKKKNSSQRDVSGESVQQGMLKLLEGSDVEVPVGATSKNAMVPLTTVNTRNILFICGGAFPDLNGIIKERLTKQAAIGFGADLRDKYNNDKEILKKVTTEDLRAFGMIPEFLGRLPIVFTLQGMSEEMLVEILKEPKNAILKQYQKLLALDEVKLEFNDDALHAIAKKALKKDTGARALRAIIEEFMLDIMYEIPKDDNIGEVIITKEYIEGTGGPVIMLRGQEVPRLQMKELVSLLNKASRAYYQEAQEIMSNYEYDRLYDELKELEDELGITLSNSPTVNVGYEVVSELPKERHESPMLSLDKTKEVEELKNFVGDQEVLISWKMDGLTVVLTYRDGKLYKAVTRGNGEVGEVITNNAKVFKNVPVQIAYQGELILRGEAVIGYKDFEKINQEIEDVDARYKNPRNLCSGSVRQLNNQITAKRNVMFYAFTLVQADGVDFQNSRACQMEWLKSQGFTTVEYYMVTRDTVEDEVAKFSSKISENDFPSDGLVLTYDDIAYGRSLGRTAKFPRDSFAFKWQDEIRETVLREIEWSPSRTGLINPVAIFDPVELEGTTVSRASVHNISIMEELELGIGDRIEVYKANMIIPQIAENLTRSGVKDIPCKCPVCQGETKIRQVGNAKALYCMNPECQAKHVKSFALFVSRDALNIEGLSEATLEKFISRGYIHTFADIFHLDQYKEKIQKMEGFGEKSYKKLTESIEKARTTTLPRVIYSLGIAGIGLANAKVICRELKYDVESLLKVSEEELNEIQGVGEVLAKAFVGYFADAKHVENFRRLLNELTIPEETVTKQQIFEGVNFVITGSVKHFANRGEVKELIESLGGKVTGSVTSKTNYLINNDVTSTSSKNKKANELGIPIISEETFLELVNQGEAMIRLNKYLSEAGVCSRREADRLIESGVVTVDGKNAVPGMKVEDGQEVCVGKKRIKSKTKKTVLAVYKPAGIVCTEDKREKKNIIRFLNYPLRVTYAGRLDKDSEGLLIMTNDGDLINGMMRARFSHEKEYKVTVNKEITPEFIEEMSRGVHIRDREKNLDAVTRPCKVRKNGKYTFSIILTQGLNRQIRRMCEALGYKVTTLKRIRIMNVELGNLKPGEVRGLTEQELKELYGTVKERENERTGQPSEMRQSRKKWERRREVHRNKLAAVIFVIMMIAFCVVNLATGDREFSATENRALEQRPELTISGIESGRWMEQYESYVSDQFAGRDFWVMLKSRVDLLAGKRKANGVFKGKDHYLLEDIAKPDEDQMKENLSAMKMFQKQYKDIPMYMMLVPNAANIESDKLPGYAVTENQEKQFKAIHSTLGSVYTWVDVSDILKKHRSEEIYYHTDHHWTTLGAYYGYQALSKSMKLDTSKTSDMKPYAVTNAFNGTLASTSGYETGYEEPIYIYAPDNLKNATEAVVNNVNEKKKTATLYDTSKLKGKDKYALFLGGNYPILDIKTTADSTDRLLIIKDSYANSLIPFLIPYYREIVVVDPRYYYDDIEKVMKKDNITSVLFLYNGNTFVKDNSISGVLQNDMLFSSIVFLFTFLPAVLVLYYLLPERFHNPVLLLASLIFYAWGEPVYIFLMLLSILFNYFSGLDIARNLTDRRLAKRSLIFNIVVNIAILGFFKYEGFVLDSLNAVLPVHITYHPLALPIGISFYTFQILSYIIDVYRGNVKVQKNILNFALYVTMFPQLIAGPIVQYADVEEQLVNRESSWDKFGEGCMYFIRGLAKKVLLANTSGMIFTEVTGLGKGNVSVLSAWLGAFAYMFQIYFDFSGYSDMAVGLGKMFGFEFCMNFNYPYIAKSITEFWRRWHISLSSWFRDYVYIPLGGNRVSKSRHIFNLMVVWFLTGLWHGAAWNFVAWGLYYGIILIIEKYILSPVLDKLPSVVRHIYSIVLVVIGWVLFFSPSLGGAARYLGMMFGAGAHGVADRESLYLLTTNLVLWIILIIGSTPLTDVRYQHMLRQKKWNTTLLNGIVYAVLFILCIAYLVTETYNPFLYFRFMRKGRLDIINTCKYLMVIALIAYVVLLVSGEGDNTVSVDTIQKNIEKSVSLKGMKKGSSQDLKKYYGLNANDYAGTMLYIPDDVMSVNEILVVKVKDKSQVEDVEKAVEERLSTQKKSFEGYGVKQTRLLHSAIDETRGYYILLAVSKDADRIEAAFKNSIYMEIDNKNSEEKEAKQPAEIPEKEKDHVLRTAVILATVIIVLGGIVVAVRLNNPKQDTTKGRKILSEMDRTDVGKVNKKIQKLEEEERVKEEAADNRSVSEKFADCLILGDSITQGLYEYGVLDEANVQADRGTEVSEVSSKKIEEHIKKAKEMKPEVLFLAYGMNDIEAQNGNASGFVKAYKNVIEDLKESLPDTKIYVNCILPAAQSAIETRPLFANVPKFNQKLKKLCKKEKVTFIDNTDLVKQEYYADDGIHMSPSYYTRWVDHMAEAAGLMNVYQLSAKNCMSHLLLKDTFDTFLFIEGEFTTFNKFTISGYLQEDFFDEKLEETYSRWEKIRDFCFQIIRGKRTPLNFKIVLALPDDQIPAFLTAHGLTAYRPEDIQGLYLNFHYDGSTLQCITGTSLKTFSMDKSIEREWDTEVKSILKSKNIEGEYMAAKKGSLSISSENIFPIIKKWVYSDHDIFARELVSNGCDAITKLKKLDMMGEYQLPDDYKPAIKVEVNPEEKTLKFTDNGLGMTADEVEEYITQIAFSGATQFLEKYKDKTTEDDMIGHFGLGFYSAFMVADEVHIDTLSYKEGAKPVHWVSNGGTEYEMEEGDKQEVGSTMTLYLNEDSLEFANEYRMREVLEKYCSFMPVEIFLSKANAEPEYETIDEADLKDDDEVIEHIHEDAKMEEKENENGEKEMVETEPAKEKVKIKKRPVSLSDIHPLWTKHPNECSDEDYLNFYRKVFMDYKEPLFWIHLNMDYPFNLKGILYFPRINTEYDSIEGTIKLYNNQVFIADNIKEVIPEYLMVLKGVIDCPDLPLNVSRSALQNDGFVNKISEYISKKVADKLSGMCKTKREDYEKYWDNISPFIKFGCLKDEKFCDKMKDAVLFKNLDHKYLTLKDCIEANGGTVEDPNAKTEDNKADDQNTEKKEEDKTIIYYVTDEIQQSQYINMFKKQGMDAVILGHNIDSPFITQLEQRNQNIKFQRIDADVTAGAKEEVAEEEKEAFQKTSDSLVEIFRKELGDEKLDVKIEKLKDENIASMMTLSEENRRMQEMMKMYGMSGMDMGTTSTLILNANHPLVQYVVDHKGSENTSIICKQLYDLAMLAHKPLNPEEMTAFVKRSNEIMMLLTKMARKITRKNFYMEIRRNFGRFISILFIVALGVAFFSGIRASEPSMRITGDAYFDESDLMDIKAVSTLGITKEDVSAVGNVKGVGKAEGAYSADFLNIKNKKQYVLHVMSAMEDMNKITVREGRMPEKAGECLVDDQMNYKIGETIKLKSGTDDKVTDTLKTDELKVVGKGNSPYYISLSRGSTTIGTGTISGFVVVPEKTFDLDVYTEMYVQVAGAKDLTAYTKVYKEKVKTVQKRIEAITEERGKIRKSELEDKANEKLAKAQKKLDDGKAESKQKLEDAKKQITDGETQVSQAKEKIASGKSQIAAAKQTIDTKQKELDQAKKTYQNGLKELSQGKKQYEQGKAAYDSQYAEAQAKIQAGEEGLVTYRAELDKGWAGYQTLLNTIEALKAQAAGGSGQNPDQENPNQDQENPNQDQELLQKIQVMELQAQETKKTLDAKEQDYQTQKAGLDAAKQKLASGKAELDQAKAKLDASEAKLTSAAASIESGQKQLDAGKAELKAQEQTLQNGETEIAQNEAKLADARKEYEDGKETSEEEIAKGEKKLADAKEQIKKIKNPKWYVYNRSTLVEYDGFGENANRMRAIGKVFPVMFFLVAALISLTGMTRMVEEQRIEIGTMKALGYGNFSIASKYLGYAFLATAGGSILGVLTGEKILPYIIIYAYEIMYPHIPKIYVPYHMSYAVMASAASIVCTMGATLASCYKELAAEPAVLMRPPAPKKGRRVLLERIGFIWKRMNFTWKSTIRNLMRYKKRFFMTIFGIGGCMALMLVGYGVKDSVYEIADIQYDEIQLYDGHIFYKDDVTKTEKEELKEYLKEDTDIQTYMDARMQSVTASKENKKRSVYQCVLGNPDIVGKYEDFHDRKTKESYKLTDNGAIVSEKTAKLLNVKEGDTINLKDGMAKGVTVKIAHICENYMGHYIYFTPQYYKKVYGKTAEYNCIMFRAKDGYSEEQVKKAGEKILAKDQVLTISYLHDIKDQLDDMLASLNLVIIVLIVSAGMLAFVVLYNLNSINITERQRELATLKVLGFYDVEVAEYVFRENILLTLIGAFVGVIFGKVLHLFVIQTVEVDAAMFGRSIYLPSYIYSFLFTIGFSLFVNWVMYFKLKKIDMVESLKSIEMSEFVTLKDVKKIYQMGEVEIMAAAGIDFEIKKGEFAVVVGPSGAGKTTVLNILGGMDTASEGQVLVDGQDIATYSTKQLTAYRRDDIGFVFQFYNLIPNLTALENVELALQICKNPMDAKEVLEEVGLGDRLDNFPAQLSGGEQQRVSIARALAKNPKLLLCDEPTGALDYNTGKSILKLLQDTCRNNGMTVILITHNSAIAPMADRVIKIKNGRVDKIIENPQPVPVETIEWMFSEELLELDRNTVEFMIEDMRRQIEEKDEQIKQLDEQIKQKDEQSRQLDEQIRQRNKQIKESDKQIRQLDEQIKESDRQIGQLDEQIKESDRQIRQLDEQIKQSEQEIQKMEEAKEMTNKLQQYFPMIRTREEVLNEIESKSRLKNLFYEWTEENQNEFLDFCTGVKGIKIMYDFMIKEILNPENTSERVNELLTLLLGQRVRIVDVLPNDGTRLADESTLLITDMVVQLEDGSIANLEIQKIGYYFPGERSACYSADLLLRQYKRVRGIKGKRFSYRDIKQVYTIVLFEKSPTEFQKFSNNYIHRFMQKSDTGVNINLLQEYLFIPLDIFKKNQQNENRSVKIENRLEAWLAFFCMDDPETIIDIIEKYPDFKEMYEQAYDVCRNIEEVMQMFSKELLELDRNTVKLMIDDMQKEIDCQREQLSQKDEEMLEMRKEIQRLQQLLDKKMKEILKVNNLIKKFPKAGGEIDDADAISVLKGINFDVEQGEYVGIMGKSGCGKTTLLKILGFMDQQTDGDVIFDGANTNELWKEELTDIRRRKIGFVFQDFNLMDSLSVKENIMLPVLLDKKEQKECEEKAEALEKQFGIEHLQEKNPYELSGGERQRVAICRALINDPSIIFADEPTGNLDSKSGKVVAEEFRKINEELGKTLLMVTHDPQMASRCKRVIFLKDGYVMNDVRKEGTEEEFYRTIIGEMEKFMNKTEKRMKIFTLIMQVIIQAVLLFPWMNMGTWKCNVPEYLIKLAASGDGMSYIKKSLKPLGVLDGADEQMMVQILMLFICELVMVLVIQVIGIVNLILALSNHHKLLLDIMSLIAGCMISFLGADGAVFSDPLSQVYPFLLVVLLVINLIGAKLIDSWQEEKKIQEEVKDREKNYKEEKKKHLEFLGKYPKGFYTALWKNFKSSKRDFIVYVSMNLLPATLIFSGVGMAQMLAPFNKEGNILTGHGITAILLEFLIVSLIASLMLMITNLLSYFRKRMRNYSIFSTLGMRKSTLYEVLGEEIVAGILGMLIGGACIGSVILCIIRRIFMARSGVGAQPAKITGFTYLIASLILIGISGIGLMILRDFFLYRELKKMQLGDVEKEKMPEKRIGLWLTIGLVIVVFGIVNFGMRKNAEGLRILLFIFLGIYLAEKFGFGLFLKVRKHKKSYYAKLIPYNSFYYRFKSTFRYVYVISLIPVLILFLFGKDMISAKIAQKPEGLFPYDFVCMATEADETFWKQLQEKYDVKFQEYPMVRVTNVDNSEKLDDARAVIMPQGQHIGISETTYKELNKALGKKSEKMNLSADGKEIYIIYQQDKSTKAHPLDYLNSRKEPYLHIGQPIESYGFLDREKIYPTRTVKGEKTDILTGAFRQGSEENLVVFSDKYFEKVQDDWKKYNWITGDPVEEGEAEEGVTIHHWPTKLVLLNVKNADYQKIEKELQAFRKVHKEDERFDKDVLSCYSKRTTMEQIESERFMTTVVDIFIMGAFLLGSVLVIYLKYESEMTDKKKRNHFLTCIGMSSKEREKLIRTETGIFFWIPAAVAVVMVPVLTGEIWNMREYTKADCVHYLRYLLIFAVIYLVVQGIGVKVIEQYTIRKVEGKHERNIKGKMKEREYLKELGKKITDSSVRKEIVNEYEAHIEDCKAALMESGMTEVEAEEEAVRQMGDPQEAGEAMDKIYHKVFDSNMFLWMLALGCIPIVCVCISYLIARDPNAYLWLWNDALGLNKIPAVIHRNIGIGLAVYGIGLSFWEKYTGKALFYAVGRDWGQGCYVANSGLVLFISALCFAPSFPVKGYAGILCCVLIACLLNMVLRGFMNLLQSRRETRLLWEIGTADTRINWKGKGYLCGHHMKVRVQGSEKGTEIPAGAPVMVVGMEGFKPVVAQVMKVNKNMVSGNTAMLILKLISEKDMYGYEMIDTLSKRSDNVFELKVGTLYPLLHSMVQSGYLESYNQEANGKLRKYYRITPNGKKYLEKMIEEWNAYANAVTSMIQYSVMSSHTLEGKKKTQNGVKRLMFTVLSILLEVVFLVGIFKGLNEYAVFIDNLTRIFAVILVLKIYGRNETSSMKTPWIILILTFPILGVALYFMIGMNGGTRKMRMRYKRIDEKLLPLLPENKEVLERLNVSDPKAGNVSNYIERNACYPVYQNTDVTYFDEAVKGLEAQLTDLAKAEQFIFMEYHAIEDEYAWSRIQTVLEERVKEGVEVRVFYDDMGSIGFVNLSFARKLEAKGIACRVFNPLLPGLNMFLNNRDHRKITVIDGKVGYTGGYNLANEYFNYTHPYGEWKDTGIRLEGDAVASLTAAFLEMWEASGKTPADVDVLDIEAQKKYLVQHPYQAKQTGYIQPYADCPLDGIQVGEDVYISIVNKADRYCWFITPYLIITDEMTHALSLAAMRGVDVRIITPGIPDKKLIYSITRSFYHNLVQDGVRIYEWTPGFCHAKMSVADDCMATCGTINLDYRSLYHHFENGCFMADCDAVLDIRRDMEQTLEQCREVTEKYKSGRSATLRLGQLFLRLFAELLMSHIIHYVTTNFKKIFHTVCTEIISCIQGTALHFVLVAAFLGTLNHFLYFLSGQSPIVALFCPVNESVWEHLKLLYFPFLFVSIWEYLSLHPVVLPFFYCRYLGVLLGMFFTVSVFYTYSGILGRNFLILDILLFYSSVIFSFGMSEYISGKTRSPHETEPGFVVSLWLITSFFFFVFTCFPPDLPLFYSAMSRKKLKNRRRKDRAQRKILIAAVCIAAVIIGVGIGGHVIKKNAGKTMTTAETESKKAVSKKKATAKKLTINENETDASNKENQGQKDQADDRSEFAVQPGRKVGTTEQSDEKVVYLTLDDGPSKNTQAVLDILDKYNAKATFFVTGAMPEYKDMIKKAYDKGHTIGMHTYSHDYAKVYASVDAYFQDLDQIGQLVKEEIGYVPCFIRFPGGSSNTISASYTKGIMTTLTQEVQARGYQYYDWNGSSGDGAVRTTEQLVDQATSFHDNNIILLSHDSETKDTTVEALPKIIEYYQSQGYVFKALDLNSYVAHHGVNNMSENENKVCPVSCKIEHHAMMFAFLAKHAIELCGEAGKDAILAGMTTYGNERGARMAANALAHGDELTTMTNQAYGEWKPDYAGQMDFGTLRTEPTLQTYIAKCAWCEAWKKHNITEYGKYYCVNVDNAVYQGFRSDFVCTPTATSMSWGGKRCEFDWGHPLSQEEVKELAEKKAKLGTSCMKDFNFHTAHLKYTVSQALILNLGEKGEEAVKLALADYVDTFGQEYLDVLNGLYPVEMNKLTTEHTPDNIIASWLDDHQEELVHTADYIFHHPELAYQETLSSKCLADYLESQGFKITWKTAGIDTSFTAVWGSGKPLLGFLAEYDALAGVGHACGHNLLGTAVAAAACALKADMEATDAAGTIRVYGCPAEEIMSGKIVMNDQGVFDDLDVAITWHPFDRNRVSNDIWQAQDIKNYTFHGISSHAAKAPEKGRSALDAAELMNVGVNYLREHVPGDVRMHYAYIDNGLPANVVPDIAKTNYFIRSYLRSRTEDASERVDNCARGAALMTDTTVDIELVASCSEMKVNRVLTELYYDAMTQVPTPTYTPEELDFAKQITEEAGLINDGTLFSGLEPLEDEPVPIAIGTDASQVSHTIPLITLSAATMCKGTPLHHWAAAKQAGMTIGQKGMLYVARCMAEGTKLLMETPGSIEKAWELHKLTPMSIVAGVTVERLQNMIDGTPRILRLLPNTPAMVFEGAFALCSGNDLTEDELEAAKSIYSMIGVVEMIPEHLLDAACGLSGGGPAYVAMFIEAMADGGVKQGLPRATAYRLAAQTCLGTAKMILKKGIHPGELKDMVTSPGGTTIEGCEALEKAGMRGAVIECINVSTEKSRSLMDPREFPTKGNLMLAKNSLMLARQGYDLMDKKRNILLKELMGLIDEAKDIQEEIDATFTKAYACLQRANIEHGISKVQELAFTVPIEDSLKMQTRSIMGTEIPHIKYDAKQNDLTYSFSITHESVDIAREAFREVKELTIKLAEVENSAYRLAANIKKTQKRANALKNITIPMYTNLVHTISNALEEKEREEFTRLKVIKRMKMMAIEYLGLSSINGPLVVLEGVENAFYDEIVEFIVDHDTRKMGRIVELDEDKAVIQVFEGTENMSLDNTHTRLTGHPMEVAVSEEMLGRTFNGIGEAIDGLGPITDAEKRDVNGLPLNPVRREYPRNYIRTGISAIDGLTTLIRGQKLPIFSGNGLPHDQLAAQIVKQASLGDNSDEQFAVVFGAMGVKHDVAEFFRKTFEESGVADHVCMFLNLANDPVVERLITPKVALTVAEYLAFEKNMHILVILTDMTSFAEAMREVSSSRGEIPSRKGYPGYLYSELATIYERAGIVDGANGSVTQLPILTMPNDDITHPIPDLTGYITEGQIVLDRNLHGQAVYPPISILPSLSRLMKDGIGKGYTREDHQDLANQLFSAYAKVGEARNLASVIGEDELSPIDKQYLKFGEEFEKRYIGQGPTENRTMMETLDLGWELLGLLPKEELDRIDTKLIEKYWKDTRDTLVTEEMSSGKTEKIYGINGPVIYLKGKTDFKMSEMVHVGEEKLVGEVISLDKDRTTVQVYEETSGLHPGELVEGTGAAVSVTLAPGILNNIFDGIERPLERIADKGGAFITRGVSVDALDRQKLWETHITVAEGDMVQGGTIIAEVPETRAIVHKCMVPPGVEGTVVSVVPDGEYTIDETLVTIELFNGEKRELSMTQHWPIRVPRPVNRRFPASVPLVTGQRILDTMFPIAKGGTAAIPGGFGTGKTMTQHQIAKWSDADIIIYIGCGERGNEMTQVLEEFSELVDPKSGNPLMDRTTLIANTSNMPVAAREASIYTGLTLAEYYRDMGYDVAIMADSTSRWAEALRELSGRLEEMPAEEGFPAYLASRLSAFYERAGMMQTLNGATGSVSIIGAVSPQGGDFSEPVTQNTKRFVRCFWGLDKSLAYARHFPAIHWLTSYSEYLNDLSGWYSDHVSPKFVDYRNRLMAILNQESSLMEIVKLIGGDVLPDDQKLILEIAKVIRLGFLQQNAFHKDDTCVSLEKQFKMMDVILYLYKTSRKLVAMGMPMSVLKAEGIFEKVIAIKYDVPNDNLQLLDLYKLDIDDFYNRVIEKNAMAHLTNEEKITHIRTAAMEEARAEANAIVKQHEDALRSVFEQHQIEARRQSETRVRAESVTAKQQLNMAMSKAQLELKREMGKTQTELKTELFEEVQLKLLAFMRTEEYKEVLIRYIEKAAQFASGMAMTIYINPSDADKKTYLEERTGMTLTISKVDFIGGVRAVVPEKNVLVDYAFKGALENEYQKFQFRGGVKGEMKMYLISDNIDTLTGMRLAGVDGIVVHEREELRCAIENAMEDKDVGVILLTEKFGREFPDLIDEIKLERTMPLLIEIPDRHGTGRKKDFITSYVNEAIGLKLMSLTVRLLLIATLLLSIVIPFGYFLIGQRTKKRYKRAIGTNVFFFFSTVLIAGIMLFAGDPVQAAEAAGNTASNATGFGYLAAALSTGLSCVGGGIAVASAASAALGAISEDSSALGKSLIFVGLAEGVCLYGLIISFMILGKLMIVKMKFLSISGPKNDIDRVCEVYLSKYEMQLENAAAELKTTDNLQPFVEVNPYKEPLAKAEQFSALLADEDRRIDVSMNQEDMLNLIRDVNHDYLDLLEKKELTKKQVDEYKEKLLIMEPFRTLELDMQKSLKYKYMKVRFGRVDVNYYKRLEKYLFDDLNAVFIEGTRNENYVYGCYFVSNADSSKVDSVFNSLHFERIAIPSEYIGTPAQACEELEKEIEEKQKEIAGIKKQISELMAKNAAKLRGAKKRLEELATNFDVRKLAARIEEGDNKEDYYILCGWMGEDDVNKFLAESKNDDKVFVVVEEDKEKFFGEPPTKLKNPRFFKPFEMFIRMYGLPANDEMDPTMFVALTYTFIFGAMFGDVGQGLCLFVFGGLLYLIKKINLAGIISIAGLFSTFFGFMFGSIFGFEDVIQAHWLRPVDAMTNLPFIGQLNTVFVVAIAFGMGLNILVMIFNVINSIKSHDVENMLFSHNGIAGLVFYGFLVLTIVLYMTGHKVPGNILMVIFLGVPVILFVFKEPLGNLVTKQHKKMEEGKVMFFVQAFFELFETMLSYFSNTISYVRIGAFAVSHAAMMEVVLMLSGASAGHTNWIVFVLGNVLVCGLEGLVVGIQVLRLEYYEMFSRFYKGTGREFKPFHSQSDEKMGNVMAYSGITTKVRAMSAKLLKEKDYDTIAGLGTVTEAIEYLKDKTAYAPYVERMDVSLYHRGNVEKILYQSLFDDYSRIFRFAGMEQKTFLKLYWKRYEVDLINYCLRIVFNHYEKPFDLEYKKEFFDRYSQISIDRLITSKNIDELVDNLRDTEYYGALARIRDSGAGTLFDYDLALDLYYFSTMWKKGKRVLKGHEQKIFLKDYGMKIDLLNLQWIYRAKKYYHMLPPDIYSMTIPIHYRIKVEEFKTLVETPTLEQFEAEVEKTYYAGKYNYMQTDKTLEQMYRDCLRKLYLTDKRNDPYSIAIVNTYLFLKEEEIYKLTTALECIRYGLTKGETLGYLGGVNQMNSVIEKLAEVEETAEAIVEHARQQKSEIEKQIQEERNQFDRDLEEETQKKLEKIKAKSQQEVEKVLDRERKKDQKAIDDLKREYEENHDIYAEEIVRHMIEVMRLRNIPRAESVLEACKEVVKNPESLCGHWNQEFQNERPLHIEIGMGKGQFLLTLAAENPQINYVGIERYSSVLLRAVEKFQELETEGKAPANIRFICMDANDLPTVFAPAEVSRIYLNFSDPWPKARHARRRLTSNEFFKLYDKVLTADGTVEFKTDNRPLFDFSVEELKTSELFVLDQLSYDLHNDSKMNQGNIMTEYEAKFSSMGNPICKLIAKRRMLHLTTQNFESFRACHWQLSSDAPAGESTEHPVFAVVMFYAVWCGKCAMMRPIIEDLEKKYQKKYSGSIRFFEVETTESGLLAAEYQTDLLPTFLFFKDQELIAVMQGMISQNDFDARLQKIFRNSMVNTPRIMKNLKRALPVAMAVVLGSTAAPLVVKADSSKVVTLGANLSDSQKNSMYEYFGTSSDKADVIEVTNADERKYLEGVAPEEQIGTRTYSCSYVEPTTSGGIQVKVSNLTYVTSSMISSTLLTSGVENCNVIAASPIEVSGTGALTGIMMAYEKATGTTLNEDQKAAATDELVTTGDLANDIGQDKAEDVMNDAKESVIEDGLKDENDIQDAVEDAAKNNDVTLTQEQIDKITELLKNISQYDYDVKALKNTLNNIDGKSEGFFSNLWNSIKGIFGGSDSSDGGIINNTDDSALGDDVVSNSTLDSSDNSSSNNSDSADNSSDSSSDDNSDDSGFWGKIKKFFKDLFGGSDSKKDNSDKSKNDANTEDSKGTDDDQSDDTQNDSLNSDADSSDAGTTDNSADDSSLNNSADDQSDTQSSLPGSSESDSSNSDTSDSTANGSANMAEKKKKPYEIGELDQYLFGQGNHYEIYKKLGAHLVQDGKQKGVYFAVWAPHAQAVSVVGEFNEWDTEANPMKREEPLGIYTCFIPGVKKNQMYKYCIETYSGEQIFKADPYANYAELRPGTASRVTDIENIKWTDTEWMTHRKTWNHKHKPMSVYEAHIGSWMRHPGREDEGFYTYREFARAITKYIKEMGYTHVELMGIAEHPFDGSWGYQVTGYYAPTSRYGTPEDFAWMINYLHRNKIGIILDWVPAHFPKDAHGLADFDGTATYEYADPRLGEHPDWGTKVFDFGKNEVRNFLISNALFWIEKFHIDGLRVDAVASMLYLDYGRKDGEWVANKYGENKNLEVIDFFKHLNSVVLGRNPGALMIAEESTAWPKVTGDVEEGGLGFSLKWNMGWMHDFTEYMKLDPYFRKDNHHLMTFAMSYAYSENYILVLSHDEVVHLKCSMLNKMPGLGFDKYANLKAGYAFMMGHAGKKLLFMGQEFAQLREWSEERELDWFLLAEPEHQQMKEWVKALLHLYKSHKAMYEMDQSWEGFEWINADDGYRSIYSFMRHSKGAKKNLLFVCNFTPMARDDYRVGVPRKKQYKLILNSDEEKYGGTGEVRKKIYKAEAKECDGRPYSFAYKLPPYGVAVFEFMDKYEYRVKTEQMLDHLEKKEYQKAMDIAESIDWRRVKNASMLNTVSEIYEYNGEFKKGRDILFLAFDRAPGSRKIVYRLGTLALKIKDIREATDCYEEFVKLAPKDPNQYILKYKILRTQGAALSDQIAALEEFKKAEYIEKWAYELAKLYDEAGMTAECLEECDDLILWFSEGKYVYLAMELKMKYKPLTPLQQEKYDSRPGAVKKQPEPVKQTESTLEEVDDENEYDEGSEEEVQESTVQRIDDAQVQEIPPEPVPMQEEFEIPEEAAQADVVPEEVVPEATAAVEETPMYREEEPEASVETPEEHTSAIKQVVTGATLEEALAQGVAVASGINIEEEAMKEREDEILANGQMMIDDILQKWEAKQKDHEEAIAKQKAKDEERLQKEREQARIRQEEERKEVERKAAEAEARRKAEEEAARKAAEEEARRKAEEEAARKAAEEEARRKAEEEARRKAEEEAARKAAEEEARRKAEEEAARKAAEEEARRKAEEEAARKAEEEARRAAEEEARRKAEEEAARKAEEEAADEKESERNTQRIPDDIVRLMEEMESENEDSEDEIYEEELEDGPGMDEDFIEGIEDELDGLDMNGSSFEEGDFDEADFEEEDLEGEDFDEGDFEEEDLEGEDFDEGDFEEEDFDEEDFDEADFEEEDLDEEELEEADFDEDDDEDDFEDIDDEETDFDEGDFEEDLDEEDFDEEEIDDDEELDFGEDLEGEDFDEADFEEEDLDEGDFDEGDFEEEDFDEEEIEDEDDTEELEIEEPSEEEIQARIKKSKGGVPFDTGFVVTGRYDLSATSEIGLKAGLTEEQKKLFSYFVPVRGMSEQIVEVLDNDRRAQREGTSKTGNLLVIGRKGSGKTVLAVDIVKAIQKQRNLKQGKVAIVTGESLNKKELTNIIQKLRGGAIIIEHAGKLNSRTVKELNYLMEKKTGELLFVLEDQRKPLERLMTANPEFKKKFSSKLELPVFINDELVTFGQTYAKENGYKLDEMGILALYSRIDVMQREDHAVSVAEVKEIMDEAIAHSQKANVKHLARRVFGKGTDDSDRIILKEEDFKIMNNTANSTTTKRLSTRKLVLIALMTAITCIFAPMAIPIPVSPVPISLTNLVIMISIYVLGFKDATISYIVYLLLGLVGLPVFSGFTGGLGKLAGPTGGYLIGFIFLALIAGLFVDKFPKNRILAVVGMLIGMAITYIFGTEWLAIQLKMSFVAALSVGVIPYLAGDAVKIIIAIIVGPVLRSRLSHMQMKRENEHKEYCEQDILDQISRMSEDTEVPDSLRSENIDKLLEKKKQKKHFRPYQIGLVAAACVAVVAGTVVWQYGRMHEGAINSPDVSDGNAGSSAGNSNTVKKISDSKKIRTAQSYDEIYKYIKRSQDNSGIAMYARSVNETAAVEDSASTGRSTASSTETASADTGVATADGGYSQTNVRQSGVDEGDIAKTDGTYLYVREDNGRTIDIVDVGNSGTNIEKYSEITLGKEYTIQEFYVNTDQKKLVAVCQKECADKSNKKQTNTDTWNQTKTAAVTYDIRDIKKPVKEGEVTQSGTYNSSRMADGYLYLFSEYYTGGDVVKDKPVTYVPLVNGKEMSQASICLPPVNCGTMYEVISSVDISKPDKTVDNKAILSEGGQMYVSGKNIYYYESEWQQDNQTVTTLRKISYRKGKLKAVAQGKVKGYLNDTFSLDEYKGNLRLFTTNDDENLVTILDKKLDKISSIENLAKGESIYSARFMKEAGYFVTYEQVDPLFSVDLSNPEKPKILGKLKIPGFSEYLHFYGEDKLLGIGMSTDEESGVSEGVKITMFDITDRADVKEESTLVLDDLYGTNAAYDYKSVLADQQKNRIGFSGYSQNGETYCLLTYNGKEKKFETILKEEISGNTSQGIRGIYIEDTLYVISGNIIEAYDMDTGKKTGDIILMKCSIKKFSEMYETVYRDLYRYALCLMKNPQEAEDAVSEAVIAAYENIHKLKKEEAFKSWIFTILTNKCKKRLKKALKETPGREEELPEQATAPDYDLAIDVKKAFFVLSEEEQILVGLSVFGGYCSQEIGEMMRLNPNTVRSKRSRALKKMECVLGSYGEDEKERREMRQIKEKGYALRFQGKLGDDEIYTGDILAIGIGYWKDSKEHECKIEKLSIMEENKRERWKKAVLPERDTKMRFYLNSRAPYVLYEGETKSRYFIDKTLMLEKIFGFIEEEVDGLYEKYLVDTVNPNGKLLDKFWSIMQKEAAGEDAKMSLILAHAEDQMMSTEVFKVLAEEMIELYKKVNKMLKLYDKGVYLLNGTEIVEEKEAVAAKTGKDVTPQEAAKNTMAYNILAAHNTSGNMDRLQIKFDKLTSHDITFVGIIQTARASGLEKFPIPYVLTNCHNSLCAVGGTINEDDHMFGLTCAKKYGGVYVPPHQAVIHQFAREMLAGGGKMILGSDSHTRYGALGTIAMGEGGPELVKQLLNKTYDIKMPGIVGIYLDGEPMKGVGPQDVALAIIGATFGNGYVNNKVMEFVGPGVSKLSADFRIGIDVMTTETTCLSSIWKTDDKIKEFYDIHGRSEDYKELNPGAVAYYDGMVYVNLSEIKPMIAMPFHPSNVYTIDEVRTNLKDILHDVEQKALVSLDGAVNYSLQDKIVNGQLYVDQGIIAGCAGGGFENICAAADIIKGHYIGSDEFTFSVYPASTPIYMELVKNGAVADLMEAGTIVKTAFCGPCFGAGDTPANNAFSIRHSTRNFPNREGSKLQSGQIASVALMDARSIAATAANKGFLTPATDMDVEYKGQKYHFDKNIYANRVFDSHGVADPSVEIKFGPNIKDWPAMAALPENLLLKVVSEIHDPVTTTDELIPSGETSSYRSNPLGLAEFALSRKDPAYVGRAKEVQKAEKAIEAGQCPLEVLDELKPVMAKVRKTYPEAGEGNLGIGSTIFAVKPGDGSAREQAASCQKVLGGWANIANEYATKRYRSNLINWGMLPFITEEDHENLSFKNGDYIFVPEIRKAIEDKSAEIKAYVVGDTLKEITLKLGDMTDAEREIILKGCLINYYRGMLSNQILHKTAQDIREITGFDCAIWDMQGLCLVRTNENLTEYELQIQDFRDDEEEPDEMILDEMGMFRIYEDSDPTYILMLKGNADGMELAGRMGASQLRNLLYAYKERMDKNRFIQNLLLDNLLLVDIYNQAKKMKIPAEIKRVVFVIEPKNEGDILVQETLKGLYATGTKDFVTAIDEKHIILVKSLQSTDDYPQVEQIAKELVTTLNMEAMVSVRAAYGTIVEELKDVSRSYKEADMALEVGRVFYVEKKILAYNELGIGRLIHQLPASLCEMFLNEVFEDGKADIFEEEELTTVYTFFDNNLNISETARRLYVHRNTLVYRLEKIQKKTGLDVRVFDDALTFKIAMMVADHMKYMKQMASLSLKHINKTYPNGFEAVKDFNLEIEDKEFIIFVGPSGCGKSTTLRMIAGLEDITSGELKIGDRVVNDVEPKDRDIAMVFQNYALYPHMTVYDNMAFGLKLRKVPKDQIDKMVREAAKILDLEPLLDRKPKALSGGQRQRVAMGRAIVRNPKVFLMDEPLSNLDAKLRGQMRIEISKLHQRLGTTIIYVTHDQTEAMTLGTRIVVMNAGIVQQVDTPQTLYDHPCNQFVAGFIGSPQMNFVDATCKVVGDKVYLVAGPSEIELPPAKAKKLIEGGYAGKTVVLGIRPEDVHDEQMFIETSPNTVIEAKIRVYEMLGAEVFLYFDYEGSSMTARVDPRTTARTGDHVKFALDAEKIHVFDKETQVTITNMAGTLYLCATPIGNLEDMTFRAVRILKEVDLIAAEDTRNSIKLLNHFEIKTPMTSYHEYNKIEKGHKLVERLQGGENIAVITDAGMPGISDPGEELVKMCQEAGITVTAVPGACACVTALTISGLGTRRFAFEAFLPTDKKERQAVLEELKDETRTMVIYEAPHRLVRTLKTLQETLGNRRISICRELTKKHETVFATTIEDALAYYDVQEPKGECVMVIEGKSREEIRNEEKARWEEMSIEEHMELYLGQGMDKKSAMKQVAKDRGVGKRDIYQALLMITKLLPNERLDDLQIKGYEIIQSPGRFCFGMDAVLLSAFARVKKNEKALDLGTGTGILPILLEAKYPGLHYTGLEIQEESADMARRSVSYNGLEERIDIVTGDIKEAASIFGAASFGVITTNPPYMIGDHGLKNQNEALYIARHEALCTLDDILRESAKILKVKGRFYMVHRPFRLPEIMTKMCAYGIEPKRMRLVYPYIDKEPNMVLIEGMKGGNPRMQVEPPLVVYQKDGSYTEELLALYGMSPSMTKVIGVRFRTAGKIYFFSPGKLEIKTGDKVIVETARGVEFGSVVTGPKEVEDDKITQPLKSVIRLATEDDKKKEEKNKEKEKEAFKICLDKIHKHSLEMKLIDAEYTFDNNKVLFYFTADGRIDFRELVKDLASVFRTRIELRQIGVRDETKIRGGIGICGRPLCCHTYLSEFAPVSIKMAKEQNLSLNPTKISGVCGRLMCCLTNEEETYEELNSHLPANGDHVTTPEGLRGDVQSVNVLRQLVKVVVTLDNDEKEIREYPAAELKFKPRRKKKDVRLSKEEMKELKALEEKNGASKLDDNMGSFKDVVGHKDILKYISSAVENNRVSHAYILNGERGSGKKMLANLFAMTLLCETGDNEPCGKCHSCKQAESGNHPDIIRVTHEKPNSISVDDIRTQVNNTVDIKPYQGPYKVYIIPQADMMTPQAQNAILKTIEEPPSYAVFLLLTENAETLLPTINSRCVMLKLRNIKDTLIKKYLMENLEIPDYKADMCTAFAQGNMGRAIMLANSDHFNEIREEAVQLLKHISEMELNEIVAAVKNISVYKLEITDYLDIIMIWYRDVLLYKATKEIDKVVFKDQLQSIKEQARKSSYEGIELILESLEKAKARLKANVNFDLVMELLFLTIKENMGKIYYMMGKSSSGKDTIYKDIRKDLPELKTLTLYTTRPMREGEKDGVEYYFVTDEILEKYREEGKIIELRTYQTVYGDWKYATIDDGQINLDENDYLMIGTLESYIKTKEYYGNENLIPLYIEVEDKERLMRAIVREQQQDHPGYEEVCRRFLADQKDFSEDNLKKAGITRRYQNDDKVRCKEEIVEVIRDGKLMNNIFDKLKVYSDSDYYAFHMPGHKRNLDLMDGTSPYRIDITEIDGFDDLHHAEGILRDAQERAARVYHADETHFLVNGSTVGIISAILGTTEKGDSILVARNCHKSVYHAIYLNELDPVYLYPKFDTEQGLSTEIDVADVQKALEEHPKICAVMIVSPTYDGVVSDIEKIAEIVHAKGCPLIVDEAHGAHFGFDPYFPKSANIYGADLVINSLHKTLPALTQTALLHVNGNMVNRRKVKQYLDMLQTSSPSYILMASIDACIGMLEETLETHSDARSDYKYKNIFSEYANRIEALRKDLKRLKYLKIIQTDNTDRYDRSKFVISVKHAPMSSHELYEILLHRYHLQMEMLAGTYVLAMTTVGDTQEGLDRLRDALLEIDKEIDTRQGRPAAIETDLPLSGRQPALEKVWTIAEAVNRRDKIQKRSFEDSIGCISVEYAYLYPPGSPLIVPGERITKEAVEILHWYQEHDFSIEGLQSEDGIEVWIDGMLEMLLDKKLLFVLMGILTGLGVVDKCIVSMTMKRMVEAAGSMSKSNHPLMRLVRAKFEHACMISDTVENVGVFVDKYLYEYKVCGLRLHTLRRLEKICAGLLIVTGLVGAGLSYQVYGMGDAVLRMGACGAGLGILVWLFHLTTDENYCMQMAKNYMVDYLENVCLHKYEKANQKERTGRRDNAIKKDETNDTKEEKAEKEDKTEQEEKEESVPVSGSGVVQMQRESRRKERVKENARNLAKASARLAGTDGSKRTEDILQEEVQSTGTLAGNAQAMEIKGNADKESAQEDVQEEIPKEDTIRELPKDEMIRQILREFMAMIGIIGAMEEEVAELKKDMQIDETIEQAGMVFCKGSLGGKAVVIVRSGIGKVNAGICAQILVDRFGVDTLINTGIAGSLDAQIDIGDMVISTDALHHDMDATIFGDPAGQIPRMDTLSFPADEKLVKKAVAANEKANPDIHTFTGRVVSGDQFISDKDVKERISSLFHPMCVEMEGAGIAQAAYLNKVSYVIIRAISDKADNSATMDYPTFEKKAIAHSVRLMKELLPMIMDYKPSGVCSRLIHVELDGDKIANVEFVGGCAGNTAGISSLVKGMDAHEVIKRLEGTKCGARPTSCPDQLSKALKQALGEMCLAVMLVGGLSLTSMLEVKAAENKVIDGSELTHENESIGYDTKITRGVDLMAGYSKCTKLGEGKIYAGGTTIAAHVVDSVQVGVLVERAKEDDTEWSYYDGWQKENLNMNRVTSNRTLYVEGGYYYRVRCTHAANSDMSSSFTGGIYIDMNNEKDELKECIAREFEEIAKEEEESLEKDTSLVVPEGTKEAVLARLKEQMREYQREQAENEAREREEAINNLSEEDRRALELGRKMLKAEVGTADTSEKKVHYRRKPLKIYLALAAVIVCVLAMGITSMGGPERVVRMVRQAVGDRDVEYTVKGKKVKTIENEDEEKAYQEIRDTFDTDVVKIFVCLPDMKFDTMNLDESKQVAEMYYSYDGETIGYIINMPYRDSSLGIDFEDPIEKKYSKEIHKCKINITLYEIEDSNVPKCVAKFKYGNIEYILMGTMSEQNFEKILKNLFFPKMKRIILTGGGTAGHVTPNIALLPRLKELNYDIHYIGSYNGIEKELIEQFGIPYHGISTGKLRRYFSVQNFTDPFRVIKGLGEAKKLVKILHPDVIFSKGGFVSVPVVLAGKSRHVPTIIHESDMTPGLANKISMPSASKICCNFPETIEHLPAGKAVLTGSPIRQELLSGDKYKALEFLHFTQDKPVIMVVGGSLGSVAVNDAVRSVLPELLQSFQVVHLCGKGKVDESLKGLQGYAQFEYIKDELKDLFALTDLVISRAGANAICELLALHKPNLLIPLSANASRGDQILNARSFERQGYSVVLEEEELNHDVLLDAIMNLYQNRETYIQAMKNSPQQNSIDTIIDLIEAAARHMEKEFTEGDAFVAAYSEYFGVVYKEALKYSGNHHIAEEIAQDAFFTAYIQCGSESKQQIKTWMLMFARYRAMNYIRDHKREVPLAEITMSEDRYPNSLIDDSSEDQVVALLKEKCFRELGIDIFQELYQKNARWYKAVTLVYYADMPQKEVAKRMGITLNALEGILKRARKWMIKRYKDQYDRLHDIMKDNNCIFCKLANGEIPTATIYEDEDFRVILDANPAAKGHALILPKEHYANLYELDDELAGKSMILAKKMITKLTKALDCDGYNIVQNNGEAAGQTVFHYHVHMIPRHKDDKVGLGWTMHELTEEEKEDVLSKIMYEVNSISVSIIEEAKDRAILRKKLPVLNGARSSRSPLLMNKNTIKAPCTILLAAVNVIVFLVLSFLGMTEDGEFMLKHGAMYVPYLIQRGEYYRLFSSMFLHFGYDHLVNNMIVLVAMGWNLELDIGKVKFLIVYFVSGLAGNVLSAWWDIQTGSMAISAGASGAIFGIIGALLYVAIRNRGRIGDISGRGLVFMIVLTLYYGFTSGGVDNMAHIGGLLAGFLSGVLLYRKRKDKYRTGISCMERKITIEEHVLYKEDYQMKMLKANSPEGFLHVGGRGVNGSSYYDYDVSGKVSMQAMYARAKLKAEDIRHFMEQLGNVLKEAERYLLDIHCILMDPEYIFYEEGRYYFCYYPLAKQDIWEKFHILTEYMVKVADYQEEECVRLAFLLHK

SEQ ID NO: 6 - protein, 861640 aa, Dorea longicatena (residues 287,215-574,428 of 861,640)
  misc_feature (294178)..(294225): Xaa can be any naturally occurring amino acid
  misc_feature (448755)..(448787): Xaa can be any naturally occurring amino acid
  misc_feature (492191)..(492242): Xaa can be any naturally occurring amino acid
  MISC_FEATURE (496529)..(496529): Selenocysteine
  MISC_FEATURE (500661)..(500661): Selenocysteine
  misc_feature (520680)..(520743): Xaa can be any naturally occurring amino acid
  MISC_FEATURE (532995)..(532995): Selenocysteine
  MISC_FEATURE (533543)..(533543): Selenocysteine
  misc_feature (586556)..(586616): Xaa can be any naturally occurring amino acid
  misc_feature (593447)..(593487): Xaa can be any naturally occurring amino acid
  misc_feature (633079)..(633129): Xaa can be any naturally occurring amino acid
  misc_feature (647602)..(647650): Xaa can be any naturally occurring amino acid
  misc_feature (676167)..(676194): Xaa can be any naturally occurring amino acid
  misc_feature (681343)..(681346): Xaa can be any naturally occurring amino acid
  misc_feature (686227)..(686260): Xaa can be any naturally occurring amino acid
  misc_feature (698382)..(698432): Xaa can be any naturally occurring amino acid
  misc_feature (700353)..(700356): Xaa can be any naturally occurring amino acid
  misc_feature (715366)..(715415): Xaa can be any naturally occurring amino acid
  misc_feature (728542)..(728598): Xaa can be any naturally occurring amino acid
  misc_feature (744213)..(744216): Xaa can be any naturally occurring amino acid
  misc_feature (818913)..(818916): Xaa can be any naturally occurring amino acid
  misc_feature (838815)..(838843): Xaa can be any naturally occurring amino acid
  misc_feature (839903)..(839955): Xaa can be any naturally occurring amino acid
  misc_feature (855487)..(855522): Xaa can be any naturally occurring amino acid
  misc_feature (860194)..(860197): Xaa can be any naturally occurring amino acid
  misc_feature (860446)..(860449): Xaa can be any naturally occurring amino acid
  misc_feature (860529)..(860582): Xaa can be any naturally occurring amino acid
ETMEDNYSLEKLIAACEEKKKEETKIPDIRKETMIDELLEERREKTSYYDTREHDWISEQEMGSSIMRETDNLWMPVKRFLNKHKKSKWGDWDGLHIEEEELMEERKQRWLKGSFTVEMAFLIPMILFLIMGCIRISFYYHDKNIIAGAAYETAVTGSTKVREKDGISESELNALFKERVGRKCILFSRIRVQSSVGKDEIKVQAAARRKKMAISVESRAAVTEPEKYIRDIRRIKKMWTISKVLAMAVLTGLSVMDYRIRKVPRDVLLLCMAGVIIYQVLTGNVDWKLSVAGGLSGILFLWISKITNEAIGYGDSLAILILGIYLGIWGLLEVLMTAFFILGIIGLICVVIKRKKKGLAFPFYPFLTVGYLLGVCIGGIMSNNLLPSQPICYSVLERVSLSVSQLLRRFSDDRQKGSVTAEAAVAVPVFFLAVVTMLYLLEMMAVHTAVRSGLQYAGKKAAKESCVTQMLMPSRIENDLVYAVGEERLGRSIVRGGSSGIDCSRSKMSARTGIGKLTTEYQVVIPVPLFGIAPVKCSEKMKIKAWSGYEREGWMDTGNDTVYVTETGLVYHKDYHCSHLDLSIRMTHLELVEGLRNENGGKYYPCEHCVKGNGGNIYITNSGDRYHSSLSCSGLKRTIYAIPISEAAGKGACSRCGQMHSKEAAGCRLCRYRRAQEKRPNRDCLNGEVTVYLTLTFVLFVSLILALVESASVQMAKNYRRADMNRALECVFAEYQKELLENYDVFAIECGYETGTYTEQNILDRLSYYGADMENEIERIQLFTDNSGELFRDQVGKYMKHKYGIAWADKYLGNVSLWKNQEEKADEFTEEEEKQNDQLKDLLGEQEAELPEEENPMQHVAELKRSPILELVLPKDKTISEKQISLQEMPEKRENHTGYGAFSDVEPEDGTLTSVLLGEYVIDHFTDFTDGPKGGELDYELEYILAGRESDKGNLETVAKKLVMLRFVPNYIYLQTSSTKQAEARAAAGTLCTLLAVPAVTEAAAQGILLAWAYGESVMDVRSLLDGQKAAITKDDTNWQLSLSGLMKLGTDEDTGTGMDVQDGMGYKDYMRMLLFLEGKERMSMRAMGIIEKNMQSIYGQPAFRIDYCAGRMEIRTVCNLRRGIKYQYRTYYGYQMKKTGAKFMVVLIGLVIIFKSQLTSLVQTIFEKITSESSGIMKYDKMVECSLERSKQKVETAKREIQEMLESKEKITVAALIQKTGFSKGFFYRNEEMRRVVNEAMHQQSVTYNPKQIIIDMAMERTLVNAKMTIQELKLKIKKLEKENAELREELARVRKISKVMKYDKMVAITQAESQRKMNIAKNTISDMLKNMERITVAELVKRTGLSRGFFYKNELIRREMDDAIHRQEAIFKNRHPVAMDRKLENSVIELKIELLKAKAENEKLAKQNQELKRKNELLQQELEKLNKRVSRKEISVLKKLMKKRIYIYEMDCYKAASEEQLQRMRISPVRYFNLEGLPSEEITEKLEEFIWERGKMLAPSSMASEVTYYNNIREFLIDRKIQSLDAREEEKIIRMLKGWMLEKGYALSSEKYRPAYDKVGNETPSIVKHMKKILKFLEEEDDRDEQEKDIWTLKNFDFPIHGNPIKNTETLNFTGIVQPDIREEVKKVIFMHLKYSPLGTIHSEMTAVKRFSKFLKRKYLDIQSLHELDRMHIEEYLIYLQTEAHDRKNYRSDLYALRRVIEDVGNLYERQHMSELFLSNDFPSTPRHVFKFYSDAEIKRLNEHIFKMDEQICRALIIHQLLGTRISDTLTLKTDCLSMRNNRYFIRIDQVKSVTYEKSISEEVAQLIMKAIDYTKERYGETTYIFVKKDDSTRPYQYSMIQNQIMTMIRQEDIRDDNGELLKFGTHIFRHCYGKKLTEMHVDDWMIAKLLGHTSIYSVHHYRKIGNKLMADETRTVREKMDMILLDIIEGWDDYEIMSAIRLLQAERQEEIQHLHKQLMSGGILQRELWEEAEKFLIQREIYDVILAEEQDLREYKQSLLDSGNYTKKQVKEQSSALRKIQKYWIETEYGELLLEIRESQVSDGALKGNIKRFLIRQGIHHIKEIDYTVRSRYEAELQKMWDEANVMKYLKVFDHIKQYSIQQEIENLPGRIEHRRKYQAQIVFLPYLPDLELVKGFEYVQDKQELVWDFSRRASEKLKKQVFLLLNYILDNLYRDDPKERRVRYLLPLHWLYDFCVEEEIDNLEGLELEQIQRFEKIVEQKVVNVKNSMQIIDNSRKILFLEAPEIHWHANVWYMERFHLAEDRLNPSNPVQRLSFIEVTNKRNRELLQEYAKYHVGIGGLTIANIRGQLYEVKRLLEYFKEEESVCQVDENQLETYFRELEEKGTKDDTFNKRIVHYLKFYQFLTVRGYMKEIPFKPEYYLKKTYPEHHDRTVEEQVYMEILHKLYAFPLVSRLIFLHLWCIGLRISEVCTLKGDAYYWDGEDAWLKVYQIKMKADKMIPIPLVMYRIMRKYIEQEHIRPKDYIFKGKNGGAYRVGTFRQEFQKYCDKNGIADGDYIFKSHDYRHTLATQFYDEDVSIQTIRDYLGHFSEEMTKQYVDFMPKRIEKASDTYFKKPENDLASTIKVKKRGDRKMAKYIVEMQMDKQEKFYFIRENKSGDIVYLPSKYLMHKKRSKISPNTIRRSAFALSYYLNFMDEKQLCLDDIYQMKYIEQHEHFTDFLLWLKAGMHSREDYLKLPNNETCNAYLKEVFRFYIFMEQENKHSGNLKVLSDTQMIVRNSIGIRKILNRKSFRGYLKEKGHQGKNIEQDKIVELLQECANSRDQVLLLLLAETGFRIGELLGVRYAEDIDYEKHIIYVNFRDDNENGARAKNAEFRRAKISDATFDILMFYIEDYKELILGQEYLFINVSGDYVGKPFKGSGVYAMLRRLEKKTGIKASPHMLRHYFANARRKDGWKLEMISQALGHRNIETTMKYLNITEDELIEVSDAFYNRHQAMYGVQNLLMYYTKEYLKRAHREIDTIFRVLFQEHGMAVREEQIMLCHEMLDNLLGRNIALCDAGVGIGKTYAYLVACVLMRKYSLLKEGCSPYELRPVVISTSSIALQKAILTEYIPFLSRILQENGTIQTPIKAVIRKGKEHFVCDERLAQRIVAIEGKNKNALQKEALLSLKEHYDMDEVSNLSGFDRRLVNVPKFCSGDCPKRGSCRYQQYLERSRDNEMFIQICNHNYLLADGYHRLQDYRPLLKDYRALIIDEAHKLPDAAKQMFGKSLCYDDIREICFYLGKEYQGSEIRKLSGAIRMVLDIIGENHRTRYGIKEEFHMTEECEMYLYEGIQTMNKIIEKLEKKIPKWIRNKLEETRSVLECFFHQDKKYVLHLKQDHDHRIILCASSRRIPQYLDQMLWSRGMGAILTSGTLKNGQGFSHIRKMTGLQRVRRVREYVADSPFEYQKNCLLYLPKDLKKYRRGSQEEAEMIAGHIHSLICSTYGHTLVLFTSYHLMGNIYQMLRDEIPFPMIEVWRHSPEEITRFKQMDNAVLFAAGSCWEGVDFPGDMVSSLIIVRLPFAVPDPISEAQKKEYANLKEYIQAVIVPDMQKKLRQGFGRALRTETDTCVVSILDERAGEGGRYHEEVMCALPSCKMAKDIKDVQHFIRNRKGVEYYLMAYNKASEERKWRYWKEQEEKKLRELGMDEEKIRKLRQMDWEDFLEERRYRERLEETMQEIDTGNPEDGEPFAMDVRELLDHVGDRRLYEVLKDTEHQTLEILLLSTWGYSIKEIANIMGLPKDTVYTKRKILRKKLKKFMKKLYKKRNTDFELLKKIIGKIQLSKIRAMFLVLGVLVSSIITFVRPQIVSTLTDNGLVKKSWGIVIWWCIILIICAAIEYGNGLAQIKICVEINNQFVSEMYQRALNKIIKAPYVYSQNRTSAELLSTINNDISRVALLLDRSSLLMIQFLFQIIGGTIGLVLLNWRIAFLLLIIIIIKQFLVNWLANNKTKLTEIYINEQQKFGTWFGDQINGILEIKLWNLYFRKNQEFFECYKNIPEINEKLEMCDGFENILETATGVIIEILIYLVCGYLVCTDNMSIGNLLAFISYAMYVSNPLAVFSNIPYMWAQIKPSAKRFMELLDWPEEELKNNIQIDLLQSDLELKNVNFKYDESHTILKDVNLKIPEGSRIAIVGDNGSGKTTIMNLLLGIILPDRGTISMGNKTIWEIGLNEWRNQFAVVGQKGYLFRGTIKDNIDLGSEKTDEEIIKMAKQLDINLNIGHHDKGYSYLVQDNGINLSGGEKQKIIFLRAFMKKSKIIILDEMFSNCDEESRRKIRNIVFDSGLKKTVILISHYKEDIADVDVVYELKDGVLIKNKVEDYHERMTNNTEILRTEGLKRSYLVNETKIDVLKGINLTINNQEFIAIMGKSGSGKTTLLKLLGLLDRPTEGKVFFKGEDSDSLRGDRLAMIRRREIGFIYQDYYLMDSLSVRENIMLPKILDHSPVEESITEAEKLADIMGVRALLDKKIFELSGGEKQRAAICRALMNHSDLILADEPTGNLDSASTETVMEYLQMINKDLKKTVVLVTHDAYVASFCNRVIFVKDGNIKVELRKNEKQDAFCDKIMKEQKNTLKRMKKDKLFFQIIKKIFEGHHKELRILILCETILTAISYAIVSGYQMFSNGHSSEYFMQEDGISKSFLSAGTIILFCGIILIITVLISYLGKRIPEYVFLQRMGISKKDLKTMVLYEAAISYLVSIIAGFFVGKILTEGLKILMVRALHINFKLGRVAFFTYPSICILILFIYGLSFLLVKELQSDFLIITNMNETARIEKLEGKFRVPKIMIGIILCIYSVYAYSKIYHYESAYLIIAFFAGLYLSLRNIFSIFLERIKHKKQKKYYKNLLMNHRFYYRMNTVSRYILFFSLMSFLSCFYFGIQFIGTINAEKAESLYPYDFMCIADKSDDKLFEKIKEKYHATLIEYPMVRVANADKTEHLEGRGEIIIQGQQIGISESTYYKLKKAVDPSYKKKSLNLDKAGKRIYVVHQQDRATKAQPVDWYYNKKTPTLHIGLPCEHCDYADHETTYEKKIVAGEEISSLTGCYSTPKCENLIVFSDEYFKKAQNEWKDTEVLTGFKLGRYKAMYGDDGEPYIVEGPTKLVFIQTDKKYIDQIDKELESKEEKHKYIGNYDSTVKFHYSSKTAITDMKTERAVKSMICVYIIVTLSMLNWIMLYAMNEMEKKEKAEREKFLISMGMDRKERKKMNKREWYIYWIVPTIILIISSVLFMRDTMIARMYPNDIWKICELQEAAVIAVWIVINGIYFWIMNRKARRRIENYDKMRQNDKENPFIHLFQTAFGYYLYDVNTNQIIKIKQDTYERLSNQEKGYKTDTNEEIEILYENGYLKNNKVQNVNHPYTELLPYALENKIHILILQVTQNCNLRCDYCLYSGKYNTRSHQNKRMNFSVAKEAIDFLKEHSKEKRKVYIAFYGGEPLLEFELIKKCVTYAENIMKDKEIEYSMTTNGTLLSPVVIEYLKKYKFKITVSLDGPKEVQDRSRRFANSDKGSFDVIIENLKYFRKRYPRFYNENVGFNSVISTEYNFLCSDNYFKEDELFKNSKFVLSGISESFSKSKVLVSSRYVEEEQYEIFKLFLSLFSRIDKKEVSLLLTEYLRHLINFKQKLENGMRNELPITGHRSGPCIPGITRLFVNAEGDFFPCEKVSELSKSCKIGTLKEGFWRGKVENLLNIEKITHDECCNCWVYSECTNCARHCDDCIAHDRKNILDTCKQVRNSVEETFKDYTVLKELGYDFCIKSEEDILNSTEKEEINAPILAIGNFWIDAQNESLKVAELIYDQMAKIGYRVAILLEEELIENVPSFSNNILNINKRIKKCEIEENPDLIIVVVPGNIVEVSDKLCGDSGTYLYMLSQSISIDSMIVNIPYFTELLQESQNVNNEIERIVGIKAYINVLPKYLDIAVSEEEGRADYLTLSTNFIIDKINKIDDERLYCSDDYESLSSLTMQIIDELSSYAGNNEVQEINNIVIEDVEEKVMEIIKQIGEKDCAIDCLKNESLFGEKIKMRARDMLVVFFELEKQFDICFTEDDIKYYTFVSIEKISACIKKHLNKMNNLQITIENYLEYCRIQKRLDSKTLKAYRIDLRQFSEQIWIIEASELTVPLLETYIAKLHQQYAPKTVKRKIASLKALFHHLEYKEIILHNPFAKLQLRFREPIILPKTIPLPTIEVLINTIYEQYYNASSNYRKKASLRDIAVIELLFATGIRISELCTIPYQNIDLQNNIIIINGKGAKERLIHICNEHVISILIKYYSKFGTAIHSCGYFFVNNIGNPLSDQSVRNMINRYCHLAGIRQHITPHMFRHSFATLLLEQNVDIRYIQTMLGHSSINVTEIYTHVTMTKQKDILKAKHPRKSLNIINQLMYKNKTNLIILISGVPSAGKTTISYELLRRVNCFRIVQETDILREILRGYNQFLAETLPNIAQKIDYLSPHTELLSYNKAKSQCKIMKNSIIEIINRQNRKQISTIICGVHIIPEILYKDINSTNVKYINLYFDCKEDLYSHLKTRDTDKYGKKSVEFLYNMNVKLQNNFSSLQFQYPHMFTSINIGKLTVEETVNFIIDFLEQMKKIFISWSKKRSEEFAKIVKSTIEKLDSDIDVFMSEEDIKAGEFVQEKIISNIENCDILILCFTTENKRSPWLLYEAGYASGLHKVVIPFLFDNDSMWHSWIDNPMNIAREISFCHGDLLKDFTEIFLLKGNLTNQHIIENFKKEIELCKEQFRDIDIQCEDLVEKLSSIDKFTITSPVFREKTAYFLSGFETFELWKTIIQSFLYTGKYLWIYGRKNMKLFGGNFNELFQYLDEKSMMPNMDGIDFKLMFLNPDSDEVNFAHKDQDIFKSELRTTMLRAKKIIGTNTVLQKCCRLYSNKRDEIIIRIDNSIIYCKPHFDIKGNPNIMTNAAFEVFSVFSKKGQHCVQKYMDVWNKAINMFMLYNIGFIIDNFLLSXXXXXXXXXXXXXXXXXXXXXXXXXXXXXXXXXXXXXXXXXXXXXXXXYCMFYFYIFFVYLYYCMDLTKSEENILEILLNSDIPLSKSGILEHAPEDKCWKDSSIHILLNSLLEKGAIHEAGFIRTGKGFGRTFAPTQKGLSYFSDLLLNISQKSQPYKIFSQLIQENVFTNEELNALEELIKLRKMGHLNISIFSIISSLILFNIASIIIIMKRKNTAFIAKYSVNLLLLSTLLAFLRLLFPIDLYYAQIINIHKIYRFFKPFFTLQLFNNFTLYQVLLIIWLLGFFLFGFYFLFLSLFEIHKLNKLESINLPVIENLIPQYSNRKIIIKVSTTIDIPKVWGFRACHLYVPNFSLSSEEWKFILEHEIEHIKLHDTFIKVFLLLVSAIFWWNPLMYILRKDIDQMLELRCDAKLIEHYSKQQQICYLETLLKVLKQKKVSIISNSHNYMTASFVNYSAYSLTRQRFEIILDNNHRNKKLIFCYYALSILLFIGSYFIILQPAEIVDTTNTPNLILHVSDDQYELYVNGKFSKILNSTDIKTSKYSKYEIIERSQMQLKKIKKFILKVCPCILGSAFLLQAYAMPVFADTLSNNYSSQSISNARVEQVTWKYRTYKGKKQRRLWSITYEKWLTDWLPAGMIIFFDWDHDGTSDHVGIVEKCEGGRVYTIEGNSSDMVKIDLITGFLGSGKTTFIKKYAKHLIDKGDNIGILENDYGAVNVDMMLLKDLEGEKCELEMIAGGCDADCHRRRFRTKLIAMGMCGYDRVIVEPSGIYDVDEFFDVLRDDPIDRWYEIGNVITVVDAKLESDLSDEADYLLASETANAGCIVLSRSQEATAEEIKNTIEHLNQAMEKVQCNRRFRDEIFVKDWETFESADYEKLLACGYVPENYRKMHIEEGETFKSLYFMNLDKTKNEIIETAEKIFADKECGKVFRIKGFLMDDDDKWMELNATHQEMRLEPITEGQKVVIVIGENLNEQRIGTFFAMKDVIKKIPIPICGVMLGAAALGNLLQSYSEGIRYVCGVFAAFLLILALLKLIMFPGAVKEDMKNPIMASVSGTFPMALMILSTYVKPFIGQAAYYIWLFAIALHIVLIIYFTVKFVFKLQMPKVFASYYIVYVGIVVASVTAPAYEKLAIGSAAFWLGFVTLILLLILVTYRYVTVKEVPDPAKPLICIYAAPTSLCIAGYVQSVMPKSYGFLMGMFVVATVIYIFALVKAIGYLKMPFFPSYAAFTFPFVISAIASKQMMACAMNMGHPMPFLKYVVLIETIIAVVLVVYTYIRFMGFIFGGKKMNIGVTEISPRAVQRAAEKNFKSGYYCCEALMCTIRDEFKLDVPKEVIAMSSGMAVGAGKSGCVCGAFNGGLLALGMFFGRTEQDGPTNPKSVKCMELVHELHDWFKKANGKNAICCRVLTKEFNMGQGEHKEQCIFFTGLCAWKVAQIVCRELGIKNLDEIDEPAERRAIADIMDIKDLKVFHTIAKEESIAKASRILYMTPQGISKIVKNLEAEMGCRLFTRNKSGMQLTESGRRFLEYADKDIEDYYQVKKDILHIEQRQRKVVDLLSAYGIIRMVTPDCIAEFCKKYPDIEFHYREYPDLQAERLFAENEGNVAFSIGEFDEELYHVVPLETFPIKLLVNEQDPLSEQESVTIEDLKNRPLYIESSQFAIYHLIIKKCEEAGFQPDIAFQTSGFSLCHKMVKENKGISVTVDFVFDDMKEQGLRLIPFSDDVYEWKVCMITRKEEAENEAVQCFLQFIQEWIGKIKSGEIIRMRSRLEDYHANDLAEVFPQLKVSERRKICRILDLDMLSDIFEHIDEQEAAEYLDEMDIKKAAAILSAMETDAVVDVLQMIPKEKKNLLIELMDDDARKDMAIIASFDEEEIGSRMTTNCIMIRENLTVKQAMSSLVEQAAKNDNISTLFMVTEDNTFYGAMDLKDLIIARRESPLENLIATSYPYVYGNELIDDCIERLKDYSEDSIPVLDNDNKLLGVITSQSMVDLVDDEMGEDYAKFAGLTAEEDLKEPLRESIKKRLPWLLVLLGLGMVVSSVVGLFEEVVSQLTIIMCFQSLILDMAGNVGTQSLAVTIRVLMDESLTGKQKAELVFKEMKIAFSNGSILGILSFALIGLYIALFKGKTFVFAYAVSGCIGVSLLLAMVISGAVGTLIPLFFKKIHVDPAVASGPLITTVNDLVAVVSYYGLSWIFLINMMHLVGMVKKTGKCISGYSALGKGQEVKVWKTKITQSRYWKSSEVIYHQVLMNSLKPMLLTSLKSYDRTQFVKDVTAGIIVAIIALPLSIALALASGVGPEAGIFTAIVAGFVISALGGSSVQIAGPTAAFATIVAGIVAKAGLDGLVISTILAGIFLILMGLCHFGSLIKFIPYTITTGFTSGIAVTIVIGQLKDFFRVTYPDGVKPIETTEKFKAFIENISTMNTAALIVGIVSLAILIISPVNFICRLMNLHIIENALPNAFTIAVLAAIESLLSCVVADGMINGKHRSDMELVAQGAGNIASALFGGIPATGAIARTAANIKNGGRTPVAGMVHSITLVIVLVVLMPFAGMIPMPTIAAILFIVAYNMCQWRTFVHLIRTAPKSDIIVLFATFILTILFDLVVAIEIGMVLACLLFIKRMSEETNIDGWTYVDDDTPDVDAHLKKLPLQIRVYEITGPLFFGAADAIEHIVVKDFTTCLVLRMRSVPAIDSTAMNALFNLTKVCENKGITLVFSHVNEQPMKVMEKAGFVELVGRENFCPNISAALAHAEEISIMKKRWKIFWIVCGSMFLIGIICCSVSWGMGTTLTDIAHQFPHGISWVSEDKTYGDPDDDDDDIDDDQEEDNETDTDDDQDEQKQEETVQAQEKANMKDATGVIEENGKATYQNIHEIKSTVREGRIHLKTQSDTDEITVESKDTHEKLGFCAFAKNGTLYLTSNKKIKRIKNIGKGTITVTLPKDMELEKAELDLKAGELRAEQILAKDLEVNAGAGEVNILEFAAEKAEFKCGAGSITATGDAKKKIEADCGVGEINLKIKGKQKDYNYDLDCGIGEIRCGDDSFSGFGREKSIDNMNRVEFMETLSRLLQDIPEEDRIDALKYYNDYFDDAGSENEQNVIEELESPEKVAMKIKADREDTEDGKEGGTEKTTEEAIGKVTGENAAYSGAREQHDRENTYQYYQEDTYGEEKDNKIYQDNGTYDYESQEKKPWTNKWLKLAMIIAIVVIGFPIVIPLGAGILALIAGIVIAVFCLFAAIVIGFAAVVMVGVVLFAAGIGSLFANPGVGLAVLGAGLMVIAIGVIGTVVGVRLCIIVFPGIVRGIVYILRKPFHRKAVAMVFNTGAALLDAIVLAVVSREDEGTYGYKITQDVRKAIDVSESTLYPVLRRLQKGDYLEVYDRQFDGRNRRYYKVTESGRTQLAMYQKEWKEYSGKISELFEGGRLEMGVKWTEEQEKVIRLRNRNILVSAAAGSGKTAVLVERIITMLTKDDPPMDVDRLLIVTFTEAAASEMKERIRLAIEKKLMEYPDNEHLKQQATLIHNAQITTIHSFCLSVIRDHFHAIDIDPGFRIGEEGELKLLRHDVLEDMLEEKYQEGSKRFLDFTAAYSTGRNDKKIEDLILKIYEFSRSYPDSEAWLDSCVKAYEIPDVKALEGSSIMKKVMTDIRKNLEDAKELLIYAENVALSPEGPAVYEATLEKDLQVIEELCNRASYKSLAEAFLNVKWARIAANKDKTVSEEKIDLVKKIREMVKGIVKNMSAQYFYESPEELVEDLRVCAPAMEELADLVRLFAERFEEQKRAQNMIDFSDMEQYALRILTQKTENGFVPSKIAEEYQKQFEEIMIDEYQDSNLIQEAILTSVSGCRSGRYNIFMVGDVKQSIYRFRLSRPELFLEKFRTYNIEESKTQRIDLHKNFRSRKEVLESANAIFRQIMTEKLGGIVYDDQAALYPGAEYPENDNVKTEILVMDSDLEILSKEEDFEEKIPSERELEARMIAMRIRELLRSQKVTDKETGELRNVRYSDIVILTRSIKGFADVFTEVLNREGIPTYAGTSEGYFQTQEIGVLMDYLRVLDNRRQDIPLTAVLSSAFAGLSQEELAEIRCAYPDTAFFESVTKYREQGENADIQLKLQKCLDQMDDFRKIVPYTPMHELLWKILETTGYGDYVASMPGGAQRKANLDMLIEKARAYESTSYKGLFHFVRYIEQLQKYDVDYGEASIEDEHADTVRVMTIHKSKGLEFPVVIVAGMGKRFNMQDARSAVAFHAGMGVGLDAVNLEYRTKIPSIIKKVIQKEEALESLGEELRVLYVALTRAKEKLIITGTLSNPEDKISDGRVFQGNKRKELSFLQLSHAVTYWDFILPAVLRTEGEPLKLQILHVEDVVKESIEEEEKSGISRAVLENWDVNEIYEPKLHDMMKEQFEFIYPYEKSSMRKLKFTVTELKKRAYEIGLDGGEEEREEEGELLQEEPEVVPMIPQFLQEDEVLAGAARGTAYHRVMELLDMKGMPEFTEDTAGEKENWKKYFMDWLDDQVRRGRIEEDAARCICWEDILQFAKSGIGRRLREADGKQRLWREQPFVLGIDARELYPEEEDGELILVQGIIDAYFEEPDGLVVLDYKTDKVRRKEELAERYQEQLRYYAKALEQMTGKKVKEKIIYSFTLKEGIYIKMPLKFVFGPSGSGKSTYLYQHVIEESEKNPQENFIVLVPEQFTMQTQKDLVRMHPRHGIMNIDVLSFARLAYRVFEETGVKKIPVLDDEGKNLILRKIAGNYEDKLTVLKGNIKKLGYISEVKSVISEFTQYDIGEEELDDMIDSLDEESRLYYKLKDIRLLYDGFQDYLRERYITKEELLDVLSREVRESELLKNSTVVLDGFTGFTPVQNRLILELMKYCKGVWITVIMDERENPYSYRHPYQLFGLSKQMVTTLISLAREEHIAVEEPVCLYGYPVKRFEKNKELAFLERNIFRYGAGTYEKEVKNLGIHVARNPGEEAMAVAEEIRKLIRKERYRYREIGVIVSDMNVYGDYLEQAFETYGIPVFMDHKRSILLNSFVEYLRSLLNMAEKNFSYESVFRFLRTNLAGFSYEEVDELENYVIGLGIRGYKGWQNRWIRRMKGMEEEELERLNHYRVQMVEKVDNLMFVLKQKRKTVKDITLAVYEFMVQENIQERLKKTEEEFHEAGELALAKEYSQIYRIIIELFDKFVALLGEEPVGLSEYCKLLDAGLEEARVGVIPPSVDQVVAGDMQRTRLKDIRALFFVGANDCFLPGALLRTGLLSERDREKFRQADHALSAGGKEKAYVQKFYLYMNLTKPSEKLKVYYSKVSADGKALRPSYLIQELLRLYPDVKVRDEDEKELVQKELTEKTGVKYLIRGLQEKNLDVTWQELYTWYQKDPKWKEKVDELLTAWYYRRPEDPLSESVAKQLYGENFEGSITRMERYASCACAHFLAYGLRLKERPVYEFKAVDLGNVCHSALELFSKKASEAGGWTILTEEQRKELIDECVEAAITDYGNSVLYSSARNEQLIVRMKQMLERTVWALTNQLKAGDFVPEAYELRFFGGKIDRVDVCETEEQVYVKVMDYKTGSKAFDIVALYHGLQLQLMIYMDAAIEFQKKRHPEKEVVPAGVFYYRIQDPIVDKTKDKEEAEQAVLKQLKPDGIIPLKAEILKHLDRDTTGESMAVPVKYNKNGSVSGYSKVVAGEDFQAMMVHARKKMKDARTKILNGDVGALPYKRGQESGCDYCPYRQVCGFDVKIPGYEYRDIGTTGKEEAMEAMRMEQKGGEMKVVVERYHGLGNDYLVFDPNHNELKLDEANVKMLCDRNEGLGADGVLEGPILKEDGMHVKVWNPDGSESETSGNGVRIFAKYLKDASYVQKKNFKLYTGNGPVEVTFLNEDGSRLRVSMGKLSFWSDEIPVIGERREVINEDMVFGRTLYPVTCVSIGNPHCVIPMREISKPLVCKIGDYSEIARYFPNRINTQIMQVIDKENIAIEIFERGAGYTRASGTGACAAAGVAYKLGLTNSKVIVHMPGGELQVEVEDDWNVYMTGDVFYIAKVTLSNEFAERLRALMEQYEKKGYLNSEFRLFHLTDQETKEVDYHYHDFDKITIFIRGKVNYMIEGRSYDLKPYDIVLVKQGDIHRLTVDNSCPYERIIVYISPNFMNAYQTDNYDLSYCFQKAAKEHSNVLRIPSFEKSSLFRSISQLEHSFTDGGYASELYRQVMFLEFMIHLNRAVRKNRLEYIDTDNCNEKVLAILDYVGEHLCENLSIDLIADQFYISKYYMMRLFKQETGYTLGQYISQKRLLLAKELLSTGAPGTQVCYDCGFKDYSTFSRAYKQLFGVTPSGRTCPMIEIKNETEKVILVGVSLSDQDDTKESLEELKDLVSTAGAETVGMVIQNREQQHPGTYVGKGKIEELKSMIWELRATGIVCDDELSPAQMKNLQDELDVKVMDRTLIILDIFAARASTSEGKIQVELAQLKYQQTRLAGFGKAMSRLGGGIGTRGPGEKKLEMDRRLIKSRIAQLNRELKDVKKHREVTREQRSRSHIPVAAIVGYTNAGKSTLLNTLTGAGILAEDKLFATLDPTTRDLKLPSGQEILMTDTVGFIRKLPHHLIEAFRSTLEEARYADIILHVVDASNPQMDEQMHTVYETLQNLGVKDKPVITVFNKIDRMEDIWVPRDLHADYYVKISARTGEGITEFLQSVEAVLREQKVEIEALYPYKEAGKIQLIRKYGELQEEEYREDGIFVRAFVPAELYGQVRPEGVTPNNCLMKKIKALLVVVCTGVLLTACGNPSQKGVEYLEDGKYDQAIEQFEQAVDKKKNVGDAYRGIGIAKWEKKDYKGARKAFKKALENDAEKTGTIYNMIGNCDLKLGKAKEALNYYNLGLAQEDSGKKMKKEMQYNIIVAYEQMEDWESAKVKLEEYLENYPNDKSAKKEAEFLKTRMAAINNDWLDALKGEFKKPYYKKLFETVNEEYRTRQIFPPADDIFNAFHLTPLHNVKAVILGQDPYHNVGQAHGLCFSVKKGVDIPPSLVNIYKELHDDLGCTIPNHGCLTKWAEQGVLMLNTVLTVRAHQANSHKDIGWEEFTDAAIMALNSQDRPIVFILWGAPAQRKARMLTNPKHLILKAPHPSPLSAYRGFFGSKPFSQTNDYLRAHGVEPIDWQIEMHTKRIIPCLDVNNGRVVKGVNFVSLRDAGDPVEIAKAYDKAGADELVFLDITASSDARGTVVDMVRKVAENVFIPFTVGGGIRTVDDFKALLREGADKISINSSAINTPNLISEAAEKFGSQCVVVAIDAKKREDGSGWNIYKNGGRIDVGIDAVEWASKVEKLGAGEILLTSMDCDGTKAGYDLELTKAIAEEVNVPVIASGGAGSLEHFYDALTEGKADAALAASLFHYKELEIREVKEYLRGKGVSVRLMIAIIDYDAGNIKSVEKAMQLLGQEVIITRDRETIMNADKVILPGVGAFGDAMSKLRQYGLDEVIRDVTAKGTPFLGICLGLQLLFERSDETPGVEGLGILKGEILRIPDKEGLKIPHMGWNSLKFQNNGRLFKGIPEDSYVYFVHSYYLKAADEGIVTATTEYSTHIHASVEQGNVFACQFHPEKSSDIGIQILKNFVELMKIISKDKKQKIKSVHHSIKTQMITSFVGLLICLVVTLMFINGKFLEPYYISKKESRFIELYEKLNDVSNEDKWDSTKKNNSLIHFAEKNNISYLVIEKDNDVHTNVHDKNMLKNQMMGYFLNQAQKESRTLDSTDVYQINQSWDPWNQSYYVDMWGSLDDGSQFLLRSPVESMRESASISNRFLLYIGSVLIVVSILLIWYFSKRITDPIRELARLSDRMADLDFDAKYTSGGSNEIGELGENFNRMSEKLESTISELKKANNSLQKDIEQKDKLEKMRNEFLGNVSHELKTPIALIQGYAEGLKEGVNEDAESREFYCDVIMDEASKMNQMVKNLLTLNQLEFGDEDIVFERFNLTALVKGVLQSMEIMADQAGAKIMLHTEEDIYAWADEFKVEQVVRNYVSNACHHVSGDMVIEVKMVQKDGKVRVSVFNTGNPIPEADAPHIWDKFYKVDKAHTREYGGNGIGLSIVKAIMKSFNQEYGVKNYDNGVEFWFELDVQMDKIKILVVDDESRMRKLVKDFLGREGYQVLEAGDGMEAMEVFYDEKDIALIILDVMMPRMDGWQVCREVRQSSKVPIIMLTARSEERDELQGFALGVDEYISKPFSPKILVARVNAILRRANVLGGGDEIDAGGIVIDKAAHQVKIDGKEIELSFKEFELLSYFVENQGIALSREKILNNVWDYDYFGDARTIDTHVKKLRSKLGEKGNYIKTIWGMGYKFEVDEAMKKKEMKTKVMAVAMSATMAASICPAVPAMAVTKDQVAKDGTYTKTAHVTRTEDDDEDEWNEYDVRVALTVKDGKFSDIVVTPENGYESGNDSYFNKAYSKSKGIKSKLAGQSATEDTINSWDTVSTATRSSDAIKKAALEAIQSAPEASTAATVDTAALEASITKAKALKESDYTAETWNTLKTALASAETALAEKKSQDTVDAAKKNLDSAIDNLKAAVKEEYKYVYAGLSWAEYWAAEGVQAAGDSSSSSELDTKGESDKGAFDVVTRATVNHGLHRGSYQCAATIEAENGKSYEVSYWTDSKTAVLTDGKTITFDRGAITEEDETTTKMTKYDVTGLKYVPVKVATEDYEAFCKAYKVVENGGELAGGFAENKLQSYKGLKAKVTADTNGLKTATKNADGTFSFSAKETGTESGIEGQELKTAPTAEEAGLTVKEAKGSYGEFLRVDLTGNYGDLGANMQSVKWTYYGDDSTYTNAKATYGTKFAADNWMHKSMGIQLGLTKSLRCTLPEGTDGTGYWTITISALGYKDVTYNFQAKDENIVKDAKEEISTTNLEAAIKKAESLTESDYTADSWAAMQTELQEAKDEIKTPHTQATVDEATSHLNEAIDALVKAEKKETYVLMNIPYAAFYKSETTKNDVDVDVFTSATKNKTRTTGLAGGSYHENTDGTKIDGITFAVKVDPSVDLTKYKEVKDTDKVDITVTNRGQTSTTTLEGKDTLFENETYAYYPLTEAPANYKEVSMDKDGKLVFSEVKGQKAEALTGVTAELLTQSSYGDYQLNLDGLPEDKIASSNVNAVVVKTTDGTAYGMRHLENIWRGNELAWSTGYTESVHGCPTSSAHYASMMGKTIDSIEYYTTNGLYTIDVNDLYVPVKFAKTEDAVKVADADISAGKTAIELNLRDDFDPEYTVEGLNVKVEGNVLTFKADSSINPGKYTLTVKDKNGKYADLKTTFILSTTDMPATYDADNKKLTVAENSNEEAFNTYIGNITSVNVNGTDYAASGRGSVKIIDKDGTLVTDAAPFKDAVAGTEFQITITSTGYTTPLTFTYKVPGETPAPSEVDTTKLAAAIEKAEGLNESDYTKDSWKALQSELTKAKSALEAKESQDTVDKAADSLNKAIDALEAATPDEPTKEVSTDALEKAIKAAGALKESDYTADSWKALQSALAEADTALKEKKDQDTVDKATEKLNKAISALVKKDAGQKVNGTNGTTGTSGKSGKTGSTSNTKSGKAAKTGDPSGMFAWLGLAVTSLGAGIGGFSLKRRKREDEEMNAKQLKKIHIWIRAIIQLLYFIFIPSVYTAAFAGVKYIFTQIGAGEKVALTSFVTVLIVVCIYTAVFGRFFCGFACAFGSLGDGVNALYRLICKKMKKKPVQIPDRIADRLVYLKYVILVIIVFMCYGGVYSKAQGTSPWDVFSMIHAGNFKLNGYLIGLVILVFLIVGMCLEERFFCRNFCPMGAVFSLVPVLPVFALRRDRESCIPKCSACSRKCPANIGLPTDGSWKVEGDCFQCQKCIDTCPKKNIHCGVKKIRGNEIWFTILRALILLGLCIWLGVMREFWMRLMSVVVIVGLILGYNSVLEVRAKDEEIAKLNAKIENTESLEDEDSKNGSYKDGTYTGEADGFGGTVKVEVIVKKQKIKEINIVSADGEDGSYLTMAKDIIPKILDAQSAEVDTISGATFSSTGIKNATKQALEKAVKMDKEKVIKKIKQGAPATSAIVVAACIGVSLSGYQAPVYEAQAQTKETKTTDADEAKKTESKAKGSFDLADGIYKGTGTGYAGEVTVAVTIKDKQITAIDILSSSDDAAFFNRAKAVIDRIIAGQTLDVDVVSGATFSSNGIISAVKNALTGEKDSGETGESQSGNAAAQGSTLSLADVQDAAAYKDGTYYGTGTGFGGTLKVKVVISGGKIASVEVVENHDDSSYLNRAKALIGNIISSQSTNVDVISGATYSSNGIKSAVRDALRQAAVSGNSQSVNTKTEDTSKTEDNTTVKGNFPYKEGIYYGTAEGYNGEIEVAVVLQDKSIKAVLVTKNHDDEKFFNRAMDVVKNIMKKQSTDVDVVSGATYSSNGLINAVKNALKEAEKVTNGQTTEPDKEKADTSELEKVMKEAEELKQEDYTEATYAVLKTRMEDAQKLLDADKTEISQEDVDQALENLNQALALLEKKDDGEDDTTVYKNGIYEGRALCRPDEDEDFTAYNLTLKVTVRDDKIVAVTDVKGDGDSSNDRYILRAANGTSNKKGVTSQLIEKGNIEGIDAVSGATCTSKAILDACENALLSAKRQMKRKIVIAILCAAVSMGTVGCGNSTASAKKTQTQTDKKEDSKSENSEKSSEEKQSRDIFAMDTYMTVTAYGEHASEAVDKAETEIKRLDEMLSTGNENSEVYKLNQNGEAVVSDDTAYLYERSEKIYKQTKGVFDISIYPVMDAWGFTTENYRIPAEDELSALLKNVDASKIQYDKKTKKITLPKNVKIDFGGIAKGYTSSRIMQIYKKCGVTSGLVSLGGNVQLLGAKPDGSAWKVAVESPDEDGNYLGILQAKDKAVITSGGYERYFEKNGKKYHHIIDPATGYPAENGLTSVTIVSDDGTLADGLSTSLFIMGKEKAEKFWKKYSDKFDVILLTDDDQLYVSEGIADDFQSDYKVNIMKKKEVDDALQALQTAIKNLKKVQEEVKKDDIRKYIEKAQKLNKEDYTKESWDALQEALKEAVEAANKDDVTQAEIDQKTEALKQAIGNLKKADGKDTGKDNNKNNDNKGNGQNVSNNNANGKNPKGGNHKNVGKNNKNNNGNAAKTGDTMPVIPIASAVAAFAVIAEIIRRRIKNRMKKKWWHDKVAYQIYPKSFLDTNGDGIGDLGGIISKLDYLKELGIDIIWLSPIYKSPFVDQGYDISDYYAIAEEFGTMEQFEELLAEAKKRDMYIIMDLVINHCSDQHEWFQKALADPEGEYADYFYFRKGKNGNPPSNYRSYFGGSCWEPVPGTDLYYLHMFAKEQPDLNWENPVVRKKLYEMVNWWLEKGLAGFRIDAIINIKKDLTFSDLDPDGPDGLANCWRMVENVDGVGIFLEDLKKHTFQKYDAFTVGEVFNMKEGELADFIGENGHFSTIFDFSAHILSEGEHGWYDAPPVDFKEWRKAISDSQLRVQTCGLEANIIENHDEPRGVSRFLPDYAQNPAGTKMLGTVSILLRGIPFIYQGQEIGMQNAVWNSVEEYNDINTIDQYHTARNAGLTDKEALKACSKLSRDNARTPVQWNAQENAGFTAGTPWLKVNDNYKEINMADQDQNPDSILNYYRRLIALRKSPTYKEVFTYGKFLPAYQDTEDVMAYYRKDEHTRILVAANFGKESVELPLDYPVKQVLLSNQHKQHNYNTESHLSLESCEVIVFELMDANLSMEQIRMDVKNVTALNQEGYDMDVISHKLDLSKDYVQTILTCAQGFTEDDTMAVAVLVEASLMLKGKHVLLGVTGGIASYKIATLTSLLVKAGADVHVIMTKNATNFINPITFETLTGHKCITDTFDRNFEFKVEHVALAQLADIVMIAPATANVMAKLAHGLADDMLTTTVLASRAPKIIAPAMNTAMYENPVTQDNIELLKHYGMEVITPASGHLACGDSGAGKMPEPETLFQYICKTIAHEKDMAGMKVLVTAGPTQEAIDPVRYITNHSSGKMGYSIAKACMLRGADVTLVTGRTALDAPLFVNTVPVISAKDMYEEVTSRSHDMDIIIKAAAVADYRPCNVANEKIKKKEGDVMSIPLERTDDILKYLGEHKEPHQFLCGFSMETQNMLENSKKKLMKKNLDMIVANNLKEQGAGFETDTNIVTMITQNEVFELELMSKEEVAFHLLDKILELRKMKTKKHDTSWMVSVALMAAIVIVLANTPLGMIQLPIIKATTVHIPVILGAILLGPAAGAILGGVFGICSLISNTMAPTLLSFAFSPFMSTTGIPGAIKAVWISVGCRILIGVAAGWLWILFSKLKVNSIIALPIVGFAGAMVNTITVMGSIYILFAKQYAEAKDVAVSAVWGLVMGTVTASGIPEAIAAAILVLAIGKVLLGVFRKMNIGNVAKANVMYRGKKTSRLKKESREVFFCYVFIRKKLPVTGSVDTKKQKFCKKIKKLKNSVDRCMINMVMNIITLFLSDCKAEVFTQSTSPTASFERMSIYIMVDIMKEKIIQGGIVNGEKMLVCPTWEDEFQKAIHKTGGCFRISMDYSAVDVSWWKELEKIAGKYGYTLDSESLEIIQEYVQKYKKYENHFWEYGKKIITFEQFSRMLSKKAGIQPKEAKEYVVANLQNLEHKEILEALLFSLQLIKSEKGLEGTQWTKPTCDFIKKEFEKMIVNEEYMELWDIYDENKERTGRTMKHNDWNMKPGEFHLTVLGVLMRPDGKYLITRRRMDKEWAAGWWEVPGGGVRAGEDSKDAVIREIKEETGIDVTNAEGGYAFSYKRVNPEEKNNYFVDIYKFVLEFDESDVKTQEEEVSGFAIADLNEIKRYADEGIFLHYDSIRQAFEEMNDEDRILEDIKEILKELDEQGRMKYTQRYMQHSDISVYKHCISVAYTSVELAERFSLNVNRKELIRGALLHDYFLYDWHEKNAGHRFHGFIHAGRALQNAKNDFELTRREENIISRHMFPLNIVPPMCKEAWLVCLADKICASKETIVRRIHIRRYKKMLNQFSRTQLLLGADNMDRLSNAKVAVFGIGGVGGYVVEALARSGVGSFVLVDDDKVCLTNINRQIIATRKTVGKYKVDVMKERILEINPDADVEVRKCFYLPENAHEFPFEEYSYVVDAVDTVTAKIEIIMRAKAAEIPVISCMGAGNKLDASAFQVADIYKTKMCPLAKVMRRELKARGVKKLKVVYSEEKPVRPLEDMSISCRQHCVCPPGTDRKCTERRDIPGSIAFVPSVAGLILAGEVVKDLTINQYGRGDEMKKNRRNNSRPAAIATAKDTTKAIETRAGVLKEAEDVKKEAKTSFYLQYMGKEISTEEITKKVHEVWTKEYGKSVEEIKTLNVYLKPEEAAAYYVINEETTGKVTIMLSERILKLPGFLYQIGNNYYYLGKWICKECTDQAATDCVTMYQMCRAGKEEPETNTYFQKLRAYSDFALEVPYNPSKIAADMKAILESLSDEQLHNLTEQIDHLEEDITRYCGMESVNDMRIKNGLMLLLTAFIWGTAFVAQSVGMDYLEPFTFNGVRSLIGGAALLPCIWILQKLNGRSKDTGTKKDLLTGGLACGVLLFAASSLQQIGIKYTTAGKAGFITAFYIVIVPVMGVFLHKKIGWKIWLAVVLAVAGLYFLCITESFSVGKGDILVFLCALVFAVHILVIDHFAPKVDGVKMSCIQFFVCGILSVPFMFALETPKITAVMTAWMPILYAGVLSCGVAYTLQILGQKNVNPAVASLLLSLESCFSVLAGWIVLGERLSIREMSGCILMFAAIILAQVPEKKKRMRFVIQRVTESSVKVDGEVIGKIGKGFMVLIGVADSDTKDTADKMLKKMLGLRIFEDENGKTNLSLDQVGGELLLISQFTLYANCKKGNRPSFIEAGKPDMAEEMYEYIISRCKEQVTVVERGKFGADMKVSLVNDGPFTIVLDSEKLMHKEMESSVFFSIFQLMQFMKYQGMKRMEELDIKPSQAGILFSLKCWGEQSQRQLAQRVGITPPSMTVALRKMEEKGYVSRKTDEKDQRITRIQLAPKGEECIDGIRRVLTEMEEIIYQGISREEVLLMKRLLAEMKNNLLESKDFKGVDMQTIMEKTHPSMKHMMGKLLKFLKPYAGAVVAIICILVVQAYCDLSLPTYTSDIVNVGIQQGGIDETVPDTISKKDLNHLLLLVPSDKQELVKNAYTKSTKKYDYKGTVMELKSSVKEDDKKMEKLSDILGKPMLLAAGFDSGSDMTQRIEDQMRTNMKKQVEAKQAEAKAQMSEVPDFDKMDIYDMLNFMGAEGRDALIKQMNKKMNSMQDSIIEQAASTYIKDAYTHVGIDTDQIETSYILHTGAKMLALAFLGMAASIMVGLLASRVGAGVGRGLRENVFRKVVGFSNAEFDKFSTASLITRSTNDIQQIQLLIVMILRMVLYAPIMAIGGIWKVFHTNVSMSWIIGLAVAIIVVIVGFLFFVVMPKFKLIQNQVDRLNLVSREILTGLSVIRAFGTQKHEEERFDDANKALTKTNLFVNRAMTFMMPLMMFVMNSITLLIVWVGGHSINDGVMQVGDMMAFIQYTMQIIMAFLMICMISVMLPRAAVSASRIDEVLTSETMIHDPKQPSRIPEEGKGKVVFDHVSFRYPGAEEDVLHDISFTAEPGKTTAFIGSTGCGKSTLVNLIPRFYDVTDGKITIDGKDVRDVSQHELREKLGYVPQKAVLFSGDIASNILYGNPDGSEAEMIEAATIAQATEFIDQKKKKYKSPISQGGANVSGGQKQRLSIARAIAKHPDVYIFDDSFSALDYKTDATLRAELKEKTAESTVMIVAQRISTILHADQIIVLEDGQIVGKGTHKELLKNCEAYYQIASSQLSEKELEEDLKEVEMPRGRGRGPQMSNEKAKDFKGTMKKLMAYLSAYKIGIFFVIVFAIGSTIFNIVGPKILGKATTEIFKGLVRKVSGGSGIDFDKIAHIVLTLLCLYLTSAVFSFVQGYIMTGVSQKLTYRLRKEISEKINRLPMNYFDKQTHGEVLSRITNDVDTLSQSLNQSATQVITSTTTIIGVLIMMLSISPLMTVVALLILPVSMGLISVIVKRSQKYFMSQQEYLGHVNGQVEEIYGGHNIIKAFNKEEDVIATFKRDNDILYTSAWKSQFLSGMMMPIMQFVGNLGYVGEVILGGYLAMKGTIQVGDIQSFIQYVRSFTMPIQQVAQVANMLQSTAAASERVFEFLEEKEEDQTVENPVCIDKLEGSVSFDHVHFGYNPDHTIINDFSVDVKPGQKVAIVGPTGAGKTTMIKLLMRFYDVGSGSIKVDGHDVRDFNRDDLRKMFGMVLQDTWLFKGSIEDNIRYGRLDATHEEVVEAAKAARAHRFIKTLPGGYQMELNEEASNVSQGQKQLLTIARAMLADPKILILDEATSSVDTRTEIQIQKAMDQLMKGRTSFVIAHRLSTIRDADVILVMKDGDIVEQGNHEELLAQNGFYAELYNSQFERSAMLDEKTMVSDALAGVNGELVRYGEMISQTENKELKQKLKQIRNDCEMSQEKLYQIAREKSYYVPAAKATDQEISHVKNILAGISTHMSEISILDLQNLRHLIGGFETSQCKMQDYASEAKDPEIRKLFQDAADSAMKNRQDLMKFLMRMIDMHCDTLWKLIDLDGQGDLMKNDCHISIPSMKKAGTVVQLFACFTKAADYKKKGGYDAAFVHVQDMVRYLRQQQERYSEDLALAYSWNDVDRNDFAGRISAIMTVEEGGILNGHMERLEELYQHGIRLMTPVWNYENCIGYPNSRKKSVMWKGLKPFGKEVIERMGELGMIIDVSHASDGTFRDIMAIAKGTVIASHSNCREIAKHPRNLTDEMIWQLADAGGIAGLNLYGPFLGREKESRIEDMTAHILHMLNKGGSDFPAIGTDFDGFGEMEVMEIGHPDEMEKLWEILKQKGVKESQLDKIWYRNAMRVLKSIMKEKVVLAYSGGLDTTAIIPWLKETFNYDVICCCIDCGQGEELDGLEERAKLSGAAKLYIEDIVDDFADNYIVPCVQAHAVYEDEYLLGTSMARPAIAKRLVEIARKENAVAICHGATGKGNDQIRFELGITALAPDIKIIAPWRMTDLWTMQSREDEIDYCKAHGIDLPFDAKHSYSRDRNLWHISHEGLELEDPSNEPNYDDLLVMSTTPEKAPDKAEYVTMTFEKGIPKSINGEEMKVSDIIRKLNELGGKHGIGIIDIVENRVVGMKSRGVYETPGGTILYAAHQQLEELILDRATAEVKKEMSDKLAQLVYEGKWFTPLREAIQAFVESTQEYVTGEVKFKLYKGTITKAGTTSPYSLYSESLASFTTGDLYDHHDASGFINLFGLPLKVRAMKLQNVNKNQKMNYDVIIIGAGPGGIFAAYELMKKKPECKIAVFEEGYPLEKRKCPIDGDKIKSCINCKRCSIMCGFGGAGAFSDGKYNITNDFGGTLFEYIGKKQAVELMKYVDEINMENGGEGTKLYSTAGTKFKKLCLQNKLNLLDASVRHLGTDINYVVLQNLYNQMKDHMDFYFDTPVDTIEKIENGYKVVCEKGSYECEKCIVSVGRSGSKWMEKVCKDLEIPTKSNRVDIGVRVELPAVIFSHLTDKLYESKIVYRTEKFEDNVRTFCMNPNGIVVNENTNGIITVNGHSYEGNEKKTDNTNFALLVAKHFSEPFKDSNGYGESIARLSNMLGGGVIVQRFGDLVRGRRSTEKRIEEGLVTPTLSATPGDLSLVLPKRILDGIVEMIYALDKVAPGTANDDTLLYGVEVKFYNMEVDIDENLESCHKGLYVIGDGSGVTHSLSHASASGVYVARHIIEEAMAVDKSLVSGSTTMLVLKLLEEKDMYGYEMIDTLRGKSKNVFELKAGTLYPLLHGLEEKGFVESYEKEAVGKIRKYYHITRSGKKELKKKSEEWKEYSKAVLDVMGGVCFGMDKKKYIQTVTEQIRCKRALPLVTKELEGHIEDQKSDYMKAGMNVEEAEEAAVLEMGDPVEVGVEMDRIHRPKMAWKMIGLIAILNLAGIVLMYLIRTSILADAGNNPGDVEWIASGIGGNINYLKSVMWTIIGLACMIGICYFDYSRIGKYGKLLTGGWIVVMGLSLFMGAVYINGAAYGILFLFGRVLPLRPFLYLIVPAYAATLYSMRRKKSGYFGVVKAILWQILPVWIILRIPNLSMAISVEVTFMILLSIAVWKEWFEVNRKRTLITLWSLVILLPAAGIGLFVKLDYVANYQMARLSAFIHPESNDGTLGGMIRNMISGAHLAGRGDCEKIKFFNRDYMLTFIIHYYGIFAAVLIIAIVGGILIWFLQKTGHQKNQLGMIMGTGCVVVLLIQFIGYVLENLGHFPLSNNYCLFLTTGGSGMMISYIMFGILLSIYRYQNVLVEPEVKKKEISVMIKVGIIGATGYAGGELVRILAGHKDAEIVWYGSRSYIDKKYADVYQNMFQIVDAKCLDDNMEELAKQADVIFTATPQGFCASMMNDKILSETKIIDLSADFRIKDVATYEKWYGIEHKSPQYIEEAVYGLCEINREDVKKARLVANPGCYTTCSILTAYPLAKEGIIDMNTLIVDAKSGTSGAGRGAKVPNLFCEVNENMKAYGVASHRHTPEIEEQLGYASGEKVLINFTPHLVPMNRGILATEYATLKKDVTCEEVKAIYDKYYKDEKFVRVLEKDVCPETKWVEGSNYVDINFKIDPRTNRIIMMGAIDNLVKGAAGQAVQNMNLMFGLPETEGLELVPMFPMNIRVMTIEDFDQVHALWMSIKGFGIRSVDDSKEGVERFLKRNPTTSVVAEEDGKIVGAILCGHDGRRGCLYHVCVDVNHRMKGIGKAMVVFTMEALKKEGINKVSLIAFTQNDIGNAFWKEIGWTKREDLNYYDFTLNEANITAFIQMKQVKGGVTAAKGFEAASTAAGIKYKDRTDMALVYSQVPCVAAGTFTTNVVKAAPVKWDQQVVKSGAKAQAVVVNSGIANACTGAEGFGYCKDTADAAAKALNISADGVLIGSTGVIGKQIPIDKLTAGIEALAGKKNDTLENGTEAAKAIMTTDTFPKELAVTIEVGGKTVTIGGMAKGSGMIHPNMCTMLAFITTDAVITKDALQKALSEDVGDTYNMISVDGDTSTNDSVVLLANGLAENPEITYGTEDYKNFAEALHTINEYLAKKIAGDGEGATALFEVKAVGCESVEQAKTLAKSIVCSNLTKTAIAGHDANWGRILCAMGYSGAQFDPEKVDLFFESKAGKIQIIENGTAVDYSEAEATKILSEPEVTAIADVKMGDKTATAWGCDLTHGYIEINADYRSMEKAMQKYLDKAEVLIEALPYIQRFNRKVIVVKYGGSAMVDEELKARVIQDVTLLKLVGFKPIIVHGGGKEISKWVGKVGMEPHFINGLRVTDAETMELAEMVLGKVNKSLVQLVEQLGVRAIGISGKDGGLLKVDKKLADGEDIGFVGDVKEVNADIIYDLLEKDFLPIIAPIGLDDEYNTYNINADDAACAIAKAINAEKLAFLTDIEGVYKDPNDPSTLISELNVSEGKKLMEEGYIGGGMLPKIQNCIDAIENGVSRVHILDGRIPHCLLLEIFTNKGIGTAIKNDVEERYYHGEMNEYMNEYMKETNEALLHTYNQFPVVLDHGEGAYLYDTEGKKYLDFAAGYAVSSLGYGNQELNGALKAQIDKLFHTSNLYYNTVCGKAAEDLKRITGMDRIFFTNSGGEAVEGTLKAARKYAYKKGTGRYEFIAMKESFHGRSFGALSVTGHDPYRAPFEPLVPGVSFAEYNDLDSVKALVTDKTCAIILEPLQGEGGINLATEEFMKGIRKLCDEEGILMICDEVQCGMGRTGSMFTWQSYGIRPDIMSMAKAIGNGIPVGAFAMTEEIAKYSLEPGDHGTTYGGNPLACTAVSKTIEIFEKKNLVAHVQELGAYLTEKLEELKSECDCVKAVKGKGLMQGIQVTKPLSEITKEALKEGLLIIGAGNDMIRFVPPLIIEKEHVDEMIRILKKVLMTGFLIALLSGALMSVQGVFNTQVTKTTGMWVSNGWVQFSAFLLCAAAWLIAGRDSIGNLWKVEPKYVLLGGVIGAGITWTVIKSMEALGPAKAALLIVISQLIVAYVIELLGLFGVDKEPLEIRKIIGMSIALIGVAIFQWKMHREKRQNRITEQRKIQKEICRILLIFTMILSMICVVNLTGCRDRKSQEQTELISLDGHEPDVEKADGNTAKEAEGSEAGTDDNMTEKDGLKQEKLQICYVHVCGAVKSPGVYELTSDSRLYEAIQMAGGFTDEAAGEALNQAEKIEDGSRIYVPTKEEAKAGTENNGTFVQNADNEKTDATKSTDAGSTADGKVDINTAGKDELMTLSGIGEAKADAIIRYRDEHGKFQKIEDLMEVEGIKDGVFQKVKDQIKIMSRRVLVVDDEKLIVKGIRFSLEQDGYDVDCAYDGEEALKLAKENAYDIILLDVMLPKYDGFEVCQQIREYSDVPIIMLTAKGDDMDKILGLDYGADDYITKPFNILEVKARIKAIMRRVSKRDKNQENEKVIVKGEMKIDCESRRVIIGEKEINLTAKEFDLLELLAMNPGKVYSRENLLNIVWGYEYPGDARTVDVHIRRLREKIETNPSDPKYVYTKWGVGYYFRGMKFRIILLVALAGIVPVLIMRGVFLTSYEKRAVEVRTAEIQNQCTILSNQLSSSGYLTGDTSETIRTELVQLSNIYSGRVMVIDGNFKIQEDTYEMDEGKTIVSGNVIRCFKEKGTSEYNKKNRYIEVTAPILGKDDSIVGVLLVSAPTDSVLDSLEILRNKADVAALASILVILMIAVLSGMAMLKPFKRITESISAVTEGYDDDYLHENTYTETMELSEAFNKMSGRMKTLDDSRNEFVSNVSHELKTPLTSMKVLADSLLLQEDAPVELYKEFMGDMSEEIERENKIINDLLSLVKMDKTANTMNIKSENMNELIEKILKRLRPIAATRNIELVYESFRPVTTEVDEMKISLAISNLVENAIKYNKENGWVHVSLNADHKNCYIEVADSGIGIPAEAQEHIFERFYRVDKSHSREIGGTGLGLAIARSAVVMHRGAIKVFSQPSEGTTFTVRIPLNYVSMKMKKIYKILLLIAVCIIAVSGCKKEDKVSGTRIYYTDSEGVSLVEKGTRIKGKTKKAQINYVLGKVQKNTDNINYRSAFVKGVKIKNWSLHSKNLTVDFNRAYQKLSVTEEIVLRASVVQSLGQIDGVDAVFFTIEGEPLEDQNGQEIGYMQPSDFVQNTGSSLHAYQNETFLLYYGNKKGTRLVKEKVNVRYSSSVSREKALVEQLIKGPDSDNESAVLPEGTKVLSVSVKDHICYVNLDAGFLDTTNVMNPEVPVYAIVNSIVDGSAISRVQILIDGKTDITYMGKINLEKPLSRNPNIVEGEMKNRPLLSVCLMVLCIIAFMVVWGRERFIKELRPSPIERYAAEGDNITICGKIYRQEQKENCRMIYLKENSIYSNSKKFQESKIIIYTNSSQKLHIGNQIKVCGKVSFYEEARNPGNFDQKFYYQKQGIHGKVRSDDIQITDYKRNKLKDRLEKFRMNWQKMLQREMGERDGSALAAILLGEKSGMDQEMKELYQVNGIGHILAISGLHLSFAGLGVYRIARRMTGSYKAGGITGGILLCLYVMMIGMTVSVIRAWVMFVFRIGADITGRHYDMPTALAASAVLTVGIHPLYLYDGGFWLSFGAVFAVCTVIPVLENEMRCKSLCAGLGINVLLWPVILYNFFEIPVYSILLNLIILPLMSVVLTCGMIGSFIKMAGWIPGKWILWICRCILWVYDKCCVFTIKLPMARWVAGRPDKRRIFIYYLVLMTVILILKFKRNGKKYIISITLYTVGFLILISGPWVRTGAEVTMLDVGQGDCICVEGPEHKTYLIDGGSSDIKNVGKYRIEPFLKYRGIGSIDYVFVSHGDIDHMNGIEEMLKRQQVGIKIRNLVVTGEAYRDEKLEELISVAEDNGTTVWEMENGTQIREGKLRFTCLGPKEKNMNPGNEASMILHLEYEGFDMLFTGDVEKEGEESLTDTLSYLQEKKISWEVLKTAHHGSKNSTTEAFLENVKPRYAWISAGRKNRYGHPHKDTLERLENSGAKIYSTQENGAFGITVNKKSMRIHGRNGMKSLNEDIKTGNFKPVYLLYGEEAYLKKQYRDRITKAIFPDGDTVNYAYYEGKGINPGELIDLAETMPFFAKRRLIVVENSGFFKNATPDLADYIKTMPDTACFLFVENEADKRGKMYKAVKSKGRVVEMARQDEKTLLYWVAGNVKKEGYKIKEQTARYLLSTTGTDMENLEKELEKLFCYCMGKEEIEISDIEAICTTQITNKIFDMVEAVAMKNQKKALDYYYDLLALKEPPMRILYLLTRQFKLLLEVKDLVGKRYDKSSIAKTVGLHPFVAGKYMQQCRTFEKKELRNILEEAVDTEEMVKTGRLNDVMSVELFIVKYSAAMSGIDQSKIRNFCIIAHIDHGKSTLADRIIEMTGLLTSREMQSQVLDNMELERERGITIKAQTVRTVYKAKDGEEYIFNLIDTPGHVDFNYEVSRSLAACDGAILVVDAAQGVEAQTLANVYLALDHDLDVVPVLNKIDLPSADPERVIEEIEDVIGIEAEDAPQISAKTGLNVDQVLEEIVAKIPAPTGDPKAPLQALIFDSLYDAYKGVIVFCRIKEGTVKKGTPILMMATGAKAEVVEVGYFGAGQFIPCEELSAGMVGYITASLKNVKDTRVGDTVTNAAHPCAEPLPGYKKVNPMVYCGLYPADGAKYPDLRDALEKLQLNDASLQFEPETSIALGFGFRCGFLGLLHLEIIQERLEREYNLDLVTTAPGVIYKVHKTNGDVIELTNPSNLPDPSEIEYMEEPMVKAEIMVTAEFIGAIMDLCQERRGVYEGMEYIEETRAVLHYQLPLNEIIYDFFDALKSRSRGYASFDYEMAGYVKSELVKLDILINKEEVDALSFIIHADTAYERGRKMCEKLKEEIPRQLFEIPIQAAIGSKIIARETVRAMRKDVLAKCYGGDISRKRKLLEKQKEGKKRMRQVGNVEIPQKAFMSVLKLDDKMRPLELYIHIPFCVKKCRYCDFLSAPATPEARQEYVMGLCQKIRSYYDLAGMYHVSSIFIGGGTPSILETQQMRSIFDAIRATFPIDSDAEITVEVNPGTVDKLKLMAYRNVGINRLSIGLQSTDDQELKMLGRIHTYKDFLDTYTLAREVEFQNINVDLMSGIPFQTLGGWEDTLKKVAELGPEHISAYSLIIEEGTPFYEKYGEGERAEARRRRELPDEDTERMMYQFTKNILWSYGYHRYEISNYAKEGYECRHNLGYWNRTEYLGIGTGAASLINNQRFVEGGEIEVLSLQNQMEEYMFLGLRKIEGVSKTDFRQTFGRSIENAYGKVLIDMYQKQLLEDTGEYIRLTEKGIDVSNYVMSEFLFMAKSFTLYKLIILYMLNEVDFPLTNSQISEFILDEGYTTYFKLQQALSELLESGFIREESTHHRTFYHLTEDGAETIHYFTNDISPAIQHDIDEFLKEKHYELKNEMSVKADYFENSNMEYSVRCQVIEQGLPLIDLTVTAPTESEAATIANNWQKRNQEIYALVMAKLLMTVHWGEKRYYSLDYYLKKTYGEKLYKISLDGGMTCPNRDGTLGTHGCIFCSRGGSGDFAASRTLSVTEQIEAGKQQSAKKYTGSSYIAYFQAYTNTYASLEYLETLYMEAITHPDIRILSIATRPDCLSEKILDLLENLNRIKPVWVELGLQTIHEESARYIRRGYELPVFENAVSELRKRGIDVIVHTILCLPNETEQDILKTIEYLNHQDIQGIKLQLLHVLKDTDLADIYLASPFYIPTPEEYYQLLGMCISHLRPDIVIHRLTGDGPKNLLIAPLWTCNKRQVLNQFQSYLKTHDIWQGKECMTNSEKALKMHEEWHGKIETCAKSHVNSREDLAIAYTPGVAEPCKVIAKDPEAAYTYTMKSNTVAVVSDGSAVLGLGNIGALAAMPVMEGKAVLFKEFGGVNAVPICLDTQDTEEIIKTVVNIAPAFGGINLEDISAPRCFEIEERLKELLDIPVFHDDQHGTAIVVLAGIINAMKVTGKDKESSKVVVNGAGSAGVAITKLLLTYGFKHVTMCDINGILGKDSKDLNWMQEKMVEVTNLEQKTGKLADALKGADIFVGVSAPNIVTPEMVASMNKDAILFAMANPVPEIMPDIAKAAGAKVVGTGRSDFPNQVNNVVAFPGIFKGALEGRATAITEDMKLATAKAIAGLVPDEELNENNILPEAFDPRVADVVSRAVKELIMMREKYESLPLATLKDLAKARGLKGISTMKKAELIERMLEEDEKEKKSARETVKELSANTGDKEVHDIDKLDSGITAHGILEVMQDGYGFIRSANYLPGENDVYVSPSQIRRFNLKTGDILEGNTRIKTQQEKFSALLYLSKINEMDPMKAMHRKNFEDMTPIFPNERLSLECGKTSTAMRIMDLMSPIGKGQRGMIVSPPKAGKTTLLKQVALSVQKNNPEVHLLILLIDERPEEVTDIRESIEGPNVEVIYSTFDELPEHHKRVSEMVIERAKRLVEHKKDVMILIDSITRLARAYNLTVPPSGRTLSGGLDPAALHMPKRFFGAARNMREGGSLTILATALVDTGSKMDDVVYEEFKGTGNMELVLDRKLSEKRMFPAIDILKSGTRREDLLLSKEEQEAVESMRRALNGLRPEEAVDNILNMFSRTRNNEELIQMVKKTKFIMKEGIHPNYYQATVTCNCGNTFVTGSTSEEIHVEICSKCHPFYTGQQKATQARGRVDKFNKKYGMDKMKSSNIGGQAVLEGIMMKNQDRYAVAVRKPDGEIFVQTETFHSITGNWKKLTTIPFVRGVFNFIDSMVLGIKTLTFSASFYEEEEEKELSGKDLKKKEKQENLIMAGTVAFSIVAAVAIFMILPYFLSTLMKPVIPSYHLRTVIEGVVRIGIFIVYILLISRMEDIQRTFMYHGAEHKCINCIEHGLPLTVENVRKSSRQHKRCGTSFLFFVLAISIILLLLIRVESPLMRVVVRIALLPVIAGISYEVLKLAGNSENALVNLLSKPGMAIQMMTTREPDDDMIEVAIQAVEAVFDWRAYERENFHTSMNGKIFTLRNLYQSGTEKLEKAGIREAKLDAWYLLEYKTGISRAVFLADPDREVEEEKAESYQKDICTRARRIPLQHITGEQEFMGLNFKVNENVLVPRQDTEILVEEALKRIRPDMQILDMCTGSGCILESILKFGEKKQMHLKGTGCDISEEALKVARENNSRLGTDARFIKSDLFESVTGKYDMIVSNPPYIRTEEINRLDEEVKLHDPWIALDGKEDGLYFYRLIVKDSIRYLNKGGYILFEIGFDQGKDVSELLKNEGYEEIEIKKDLAGLDRVVMGRYNKEMFDKLEDLRIRLDEILNELQEPDVANDQNRFRKLMKEQNDLTPIVEAYNEYKECKQAIEDSLEMLEEESDEEMRELAKEELNDNKKRVEELEQELKILLLPKDPNDEKNVIVEIRAGAGGDEAALFAAEIYRMYMHYAESQRWKVELVECEEIGIGGMKNVTFMIDGKGAYSKMKYESGVHRVQRVPETESGGRIHTSTITVAVMPEAEDVDIQIDEKDIRIDVMRASGNGGQCVNTTDSAVRLTHYPTGIVIYSQTEKSQLQNKDKAFALLRAKLYDLECQKRHDAEAEARKSQIGTGDRSEKIRTYNFPQGRVTDHRIGLTLYKLDKIMNGDIQEIIDACIAADQAAKLANMNEEMMGATQFKRAELEDQEIISHYFEHHTSRSCERTFANVYLWSRQYPVKWAIIKNALVFKSEDENHVSFAYPAGAPEDVKNALEEMMEYSKAKGRPFLMYNVTPEYFAQLEEWYPGRFQIEYDRDSADYVYESEKLATLSGKKLHGKRNHINKFKSLFEDRWSYESMTKDNLEECFQMALKWRTENDCEDDDEKRGEMCVALNSLRLFEELHLTGGVLRIDGKVVAFTIGEPICEDTYVVHIEKAYADVQGAYTMINQQFVEHECMNYKYVNREDDTGAEGLRKAKLSYRPAFMVEKGDVTEKAQGMIADKMKNMVANSSAIRAMFEEGNRLAGIYGAENVFDFSLGNPNVPAPEAVKNAIIEIVSEEDPIVLHGYTNSNCGYADVREAVADSLNKRFDTHFEGKNIVMTVGAAGGLNVILKALINPGDEVIAFAPYFGEYRSYTNNYDGVLVEISPNTVDFQPKLDEFEQKITPKTKAVIVNNPNNPTGVVYSEETIKKLAAIMEAKQKEFGTDIVLISDEPYRELAYDGVEVPYLTKYYDNTVVGYSYSKSLSLPGERIGYLVIPDELKDSEEVLSAANVATRILGFVNAPTLQQKVVEKCLNEKTDLSFYDRNREDLYNGLKECGFECIKPQGAFYLFVKSPVPNEKEFCEAAKKYNILIVPGSSFACPGYVRLAYCVSHETIVNSLPKFKELAKEYFMKAFEKNIRKVEPYVPGEQPQRKVIKLNTNENPYAPAPGVTKALEEMNTDRLRLYPDPTAAPLVNALADFYHVNPDQVFVGVGSDDVLSMCFLTFFNSEKPIFFPDITYSFYKVWADLYRIPYECQKLDENFKIVKEDYYKENGGVIFPNPNAPTGLYEELVDVEDIIAHNQDVIVIVDEAYVDFAGSSAMELIDKYENLIIVQTFSKARSMAGMRIGYAISNPTLIKYLNDAKYSFNSYTMNQTSLVCGVEAVKDKAYFEECVNKIIETREWAKEELKNLGFHCLDSKSNFIFAMHPDYDAKELFEALKENDIYVRFWGSERIEQYMRITVGTREEMEAMFAFLKKYMNKMTNTLIHGIIDALSGSVSKEVIVFLISMIPILELRGALLVAGPILGVKVSTAIPICIIGNIIPVPFILLLITPVFNWMKGTKTFKPLVDKLESKAMRQKDQIEKYEFWGLVLFVGIPLPGTGAWTGSLIAALLGMKFKKAFPAVIIGICMATVIMWFISYVLLGGVHLLGMSMKVNKVLPSPAELKEEYPLSEKLIQLKKERDAEIRDIFTGKSDKFAVIIGPCSADNEDSVCEYVCRLAKVNEKVKDRLVLIPRIYTNKPRTTGEGYKGMLHQPDPDKAPDLYAGIMAIRKMHIRAMKESGLTAADEMLYPENRSYLDDILSYEAVGARSVENQQHRLTASGMDIPVGMKNPTSGDLSVMLNSIVAAQMGHRFIYRTMDVTTSGNPLAHTILRGGVDKYGQCIPNYHYEECVRLWELYQKKDLKNPAAVIDVNHSNSNKKYKEQIRIVSEVLHSRRYNPDLKKMIKGVMVESYLEEGRQDISADMIYGKSITDPCIGWEDTEKLIYKIAEECMEKIYDVTALGEMLIDFAVNGESEQGNQLFEACPGGAPCNVLAMLNKLGRKTAFIGKVGDDQFGKLLRDTITNIGIEAKGLVMDQDIHTTLAFVHTFPDGDREFSFYRKPGADMMLKEEEVDYDLIRQSKVFHFGTLSMTDEPVKSATKKALAVAKEAGCMITFDPNLRPPLWKTLDEAKAQMEYGFENCDVLKISDNEIQFVSGKEDYDEGIKYLQEKYQIPLIFLTMGKEGSRAYYKNFRVEQPGFTVKAIETTGAGDTFCGCSINGVLKYGLDNLDETKLKEILTYANAGAALITMKKGAIRSMPEPENIKELIGKMLAVWAAKISEKASVHIFHRQGVTWAGKIALKIDPSILHDLAGQVRKDIFIVCGTNGKTTTNNMLCAAIEKEGYKVICNHTGSNMLNGVVAAFVLGAGLSGNLDADYACIEIDEASTRRVFPHFKPDYMVLTNLFRDQLDRYGEIDITMNILKEVMQSAPKMKVIVNGDDALSAYLAMESGNPYVTYGISEKVVDDKDSHEIREGRFCKKCGAPLKYNFYHYSQLGDYACTGCDFKRPAIEYDASDVAVSDHLAFTVDGRRLEANYKGFYNVYNILAAYAAGRTGGLGLEHFQDMLTDFNPENGRMEQFEVKGTKIVLNLAKNPAGFNQNISAVMQDDSMKDVIIVINDNAQDGTDVSWLWDVDFDRFKGANVNSITVSGIRCQDMRLRMKYVDIPSMLEADVEKAIRERVEDGCGNLYVLVNYTALFSTRNVLKKMEEERMDTKDMKITIGHLYPDLLNLYGDRGNIACLMKRCIWRGIEAETIEFNTGDQIDFSKLDIVLLGGGSDREQAIVCKSLLEIQSEFKDYVEDGGVVIAVCGGYQLLGKYYKTDAGMIEGLNLVDIYTEQEEGRLIDNIVLDSDLVDMPVVGFENHGGRTYLNGNKPFGKVLYGAGNDGKSGYEGVVYKNVIGTYLHGPLLPKNPQVSDYLIQKALERKYGEVQLMPLDDSQEKEANDYIYHRFVKMPFSEKLKKLREENHYTQKYVAKHLNVARSTIAGYETKNRQPSHEKLTILAELFHVSVDYLLDDDISEITLSDNSTAQKSEHYLLTHFHRLSNSSKKELLNFLQYLEQRDESARSKSALMRVERFKMEREGLVTEGQEVEISERSAVTGQYTYLVEPSIAMSGIYRTRQRIKSRKGKIQKIEQTDRGFYLLVEIDEMIANNDEAKRSKIWTVVTAVTSVLIVIIAIFLLMKMFTGNPLEGSWTDEDGNMDLKIGRNGQMTVILPASGDGEETQVPMTYTLSKESKTISIQEDDNKIQEIAEKSNGQYTEETLKNAVQSIGTTFEYSIDGGTMTLTEREYGEQMMFNKKMDNYRNKTRKVQIGDVCIGGGEKIAIQSMTNTKTEDVEACVAQILRLEKAGCDIIRVAVPTMEAAESISKIKKQIHIPLVADIHFDYRLAIAAIENGADKIRINPGNIGDEKRVRAVVEKAKEYHIPIRVGVNSGSLEKHLVEKYHGVTAEGLVESALDKVHLIENMGYDNLVVSIKSSDVMMCVKAHELLAPQCPYPLHVGITESGTLLAGNIKSSIGLGLILSQGIGDTIRVSLTGDPVEEIKSAKLILKTLGLRKGGIEVVSCPTCGRTKIDLIGLANQVQDMVADIPLDIKVAVMGCVVNGPGEAKEADIGIAGGCGEGLLIKKGEIVKKVKEEELLETLRQELLHWNEMSKPFFEVFPTLKVKDDIQMMFQGVEVTKVSTNSTRDFIRVSLYSRHLIQKKHIYEVERLLKQQLFARSHIQVSVKEQYDLSEQYTPENLMNEYYDSFLMELDQRSVVERNMLQNASYEFENGNILCLTLTDTIVAQGKKDSLSTYLSDVFEERFHRPVEIRVLYEKAKDSKLKYNEAKLEQEIEAIREQSQAVKAKKAQELEQKEEKKDEKTKAKSNSAGESGNNTKSGRRSSGGFKKGGSFGKGGYSFVRKATDDPNLIYGRDFDDETIELKNVLGEMGEITIRGKVISMETREIRNEKTIIMFAVTDFTDSIMVKMFVRNDQLADILGDIKNGAFLKLKGVTTVDRFDSELNIQSVVGIKKISDFTESRVDTAPEKRVELHCHTKMSDMDAVTDVTTLLKQAHDWGHPAMAITDHGVVQAFTDANHYIESLDKDDPFKVIYGVEGYLVDDLTDVAVNEKGQPLDDTYVVFDLETTGFSPIKDKIIEIGAVKVEHGEITDKFSTFVNPKVPIPFQITQLTSITDQMVIGAPDIETVLPQFLEFIGDAALVAHNASFDVSFIEQNCRYQDIQPDFTSVDTVAMARILLPTLSKYKLNVVANALHISLENHHRAVDDAGATAEIFVKFIEMLKDRGIYDLAKLNQFGENNADAVRKLPSYHVIILALNEVGRVNLYTLISMSHLKYYARRPRIPKSELSKYREGLLVGSACEAGELYQAILNDKSEERIAKIANFYDYLEIQPLGNNQFMIESQKITKVQNEEDLKEINRKIVALGERFNKPVVGTCDVHFMNPEDEVYRRIIMAGKGFGDADNQPPLYLRTTDEMLEEFEYLGSAKAREIVIENPVKIAEMVEKITPVRPDKCPPVIPDSDKMLRDICYNKAHSMYGENLPEIVTERLERELNSIISNGFAVMYIIAQKLVWKSVEDGYLVGSRGSVGSSFVATMAGITEVNPLSPHYYCKKCHYSDFDSEEVRKFAGGCGWDMPDRVCPVCGEKLIKDGFDIPFETFLGFKGNKEPDIDLNFSGDYQSNAHKYTEVIFGAGQTFRAGTVGTLADKTAFGYVKNYYEEHGQGKRKCEIDRIVQGCTGIRRSTGQHPGGIIVLPLGEEINSFTPVQHPANDMTTDIVTTHFDYHSIDHNLLKLDILGHDDPTMIKTLEEYISSPAMDNEYNETDNRFDATKIPLDDPGVISLFHDTSALGIKPDDIGGCPVGCLGIPEFGTDFVIQMVVDTKPNTISDLIRISGLSHGTDVWLNNAQELIRSGKATISTAICTRDDIMTYLINKGMDSEESFTIMERVRKGTVAKGKCKEWPEFKKDMAEHNVPDWYVWSCEQIKYMFPKAHAAAYVMMAYRIAYCKINYPLAYYGAYFGIRADAFSYEIMCQGKEKLQYYIDDYNRRSATLSKKEQDTMKDMKIVQEMYARGFEFEPLDIYKAQATKFLIVNGKLMPPLSSIDGMGEKAAEAVAEASKDGTYLSLDDFRQRTKASKTVIDTMVELGILADLPASNQLSLFDFMGRMKQSQITYWCHEIIRSQAEEGGYYIDATMGKGNDTLFLCELAGEKGKVLAFDIQQEALDVTKELLKTHGKEMQAELILDGHEHMDRYAGKESADVICFNFGYLPGGNHNLATTYRTSIEAIGKGLGILKHGGMMSLCIYSGGDTGFEEKEKILEYVKALPGKEYTVIVNEYYNRKNCPPMPVFIFKEMRRKDREVTEMEEIQQIFDECKVCRIGIMDENGPYIVPVNYGYVREEGKVILYIHGAREGKKIDLIRKNANVGVEIDYRHELVEGDTACQYSYYYASIIGKGTASIIDNPREKLKALNVIMKHQTGRTFDEFQKNPNLEKAVAIIRIDLNEYSCKKHIMSEKVIMLGNEAIARGAYEAGVKVSAAYPGTPSTEISENLVKYKDSLYCEWSPNEKVATEVAIGASVAGVRAMSCMKHVGFNVAADPTYTVSYMGVNGGLVIVVADDPGLYSSQNEQDTRMVARAAQLPVIEPSDSSEAKEFIKVAFDLSEKFDRPFVYRTTTRLAHSQGLVELNERKEIEDKPYEKNIRKNVMMPGNAKLRHVEIEKRNLELAEAANTLPINKVEMNDTKIGVITSGIPYQYVKEALPEASVLKLGMVNPLPRKLIEEFASKVDTLYVVEELDPVIETQVKSWGIKAIGKEIFTVQGEYSANMLREAILKEELDISKPAQAPGRPPILCPGCPHRGVYYVLNKLKIHAAGDIGCYTLGAVAPLSVVDTTICMGASISSLHGMEKAKGKEYIKNWVAVIGDSTFLHTGVNSLMNMMYNKATGTVIILDNSTTGMTGHQDHAATGKTLQGDPTYAIDIPALCRAIGVKNVVEVNARDIQAVEKAVKEEIAKDEVSVIITKTPCVLLDKSKKPLYQTHTDKCKKCGMCMKPGCPAMTKNADGTVSIDDTMCTGCGLCASLCKFDAIELVKEGDRMATKNIMIVGVGGQGTLLTSRILGGLAITGGYDVKLSEVHGMAQRGGSVVTFVRYGDQVAEPIVEEGQADVIIAFERLEALRYAHFLKKDGALIINDWRIDPMPVVIGAAEYPEDIIETLGKDHKVYTVNATEEAKKIGNSRVFNLIVLGVAAQHMDFTKEQWYEVIEKTVPPKTIEINKKAFDVGYYLMAKVALKDWKEQIRDPKIECMSRDEMTALQSERLVKQVKNVYDHVEFYRKKMDDIGIEPGDIKGIEDIGKLPFTTKEDLRANYPFGLLAVPQEKIVRVQGTSGTTGKLTLASYTQKDVDVWGECVARGLTMAGLTAEDRLHICYGYGLFTGGMGLDFGARKLGAMAIPMSAGNTKRQLMCMEDFGATAFACTPSYALYLAEAANEAGIVDKLRLKVGINGAEPWTEEMRLKIEELLNVNCFDIYGLCEITGPGVALECIHHKGMHIYEDYFYPEVLNPADHTPCADGETGELVFTTLVKEGMPLLRYRTKDLTSIDHSTCECGRTLPRISKFKGRTDDMKVIRGVNVFPTQVETALLSIGGGVAPHYMMIVDRENNLDVLTVMVEVDEKYFSDEIRKLDELKNKVAAVLKQALGVAVRVKLVEPKTIERSEGKAKRVIDNRGLMGVSNTVQQLSVFLENREGRLEEVLDVLAKKGVNIVALSLADTSDYGMLRLIVSDPHKGRAALKEAGITAMLTDVVALRVPHATGSLNKAMHQIVDGEVNIEYMYAFANGADAAAVLKSDDPGRVIDILKGSGFDVYSADEAYRANQMSVDKNSVLKKLRESDAIYVLMSDCTRMPFVVCDPETYDDEVFVFFSEEDAMRGGQEFLKANNPLKIFNIEKKYLLPFYSSLFPIGVNCMVIGKGTEEEIAIQLGELVRRPEQKPGEEPIENPELQITAMYFMQKVRSQKELKLTDETKELQEELMAHYQRGRYITAISEDKKMPILNKDDGQVLMPIFTDVQEFLKFQNENRDMKYTMGVVEAARIPEAMGPEVTGVVVNPFGIDLQLNVSRPQKMKGTVKWFNNQKGYGFISDAEGHDVFVHYSGLNMEGFKTLEEGQEVEYEVTEGAKGPQAVNVTPLMITLTGKKISEGIAIGKLSFYKRDTKEIRRIYVKDVEKEVMRFQKARQKALQELRDLYDSASKEVGEANAAIFEMQQMILEDQEIIRQITNIIVEHKLNAEYAVKNAVENVLASAAKSNKSYVQGHEADIKDVSTRVLRILARAWKDKMLTDEPFILAAGELYPSEAVKLDKSKILGFVTRYGTINSHTAVLARTKGIPSVIGLGESLKKEYEGKTIIIDGFEGKVYIEPDYTTISKMKQRQDENHTQVQSLERLKGKENITQSGQKIDVCANIGSREDIESVLRSDAGGIGLFRSEFIYMENGPKLPTEEQQFQVYRLAAEAMGMKKVVIRTADLGGEKTAECLDLGEENNPEMGYRGIRVSLDKDEIFKTQLRAILRASAYGKMSIMFPMVTDVKEVQQAKLLLEKIKKELKDEKIPFNEEIQIGVMIETPAAVMISGELAREADFFSIGTNDLTQLTLGMDRTNSKLDHFYNPHHPALLKMIRIIANNVHLEGKTISICGDLAADLDMTEQFLQMGIDELSVAPNQVLALRKKIREIQMLEKLFKLRENGTDAKTEVMAGITTFMTMAYILAVNPSILSATGMDSGAIFTSTALAAMIGTFLMAFFANYPFALAPGMGLNAYFAYTVVLGMGYKWEVALTAVFVEGIVFIVLSLTNIREAIFNAIPKNLKSAVSVGIGLFIAFIGLQNANIVVGGSTLLQLFSIDGYNSAKGVEASMSNVGITVILALIGVGITGILVIKNVKGNILWGILITWILGIICQMAGIYVANPEIGFYSLLPDFSKGFTIPSIMPVFGKLDFSGIFSLNFIVVIFAFLFVDMFDTIGTLIGVSTKAGMLDEEGRLPNIKGALMADAVATTVGAVLGTTTTTTFVESASGVSEGGRTGLTSATTAILFGLSLFLSPIFLAIPSFATAPALIVVGFYMLTNVTHIDFDDFSEALPCYICILAMPFFYSISEGISMGVISYVILNLMTGKAKEKKISALMYVLTVLFILKYVFLMNLLTMEHITKAYTDRVLLNDVAFSINENEKIGVIGINGMGKSTLLKVAAGIEPYDEGKISIGNQVKICYLPQTPEFEEGTTVLRAAIADNVNELNQWTIEADARSMLNKLGFYDYDEKVEHMSGGQKKRIALVNALLTPADILVLDEPTNHLDNAMSEWLEEYLIGFRGAILMVTHDRYFLDRVATRIVEVDQGKLYSYPGNYSEFVKLKAERQDMALATERKRKSLLRTELEWLGRGARARSTKQKAHIDRIKAMQEIKDIQEEKKVVLDSVASRMGNKTIELQNISKSYGARKLIDDYSYIFLKNDRIGIIGPNGCGKTTLLKIINGIVKPDNGTIEIGQTIRIGYFSQENEYMDASMKVIDYVKEVGEYVTTSDGKITASQMLERFLFDGAMQWSKIEKLSGGEKRRLYLMRVLMSAPNVLILDEPTNDLDIQTLTILEDYLDHFDGIIITVSHDRYFLDRIVNRIFSFEGDGKVRQFEGGYSDYLIRKELEGLDTEMSLKGHAAGTEEQPKKAESSSKDTWKQREPKLKFTFKEQREFESIDDDIAKLEEKIETLDAQIAANATNSVKLRELMEKKEETENALDEKMDRWVYLNDLNEKIQNTKQQGMNWTRERLKTNGKIAFKKNYWACVAVAVIMGIITGLSSISGGRTGSGASQNSLYGNDGFSFSYHYGWGFPFAGLAIAMAAIILMIVIWALKIFVGNLLEVGGKRFFVLNKTENPTVGTMFDAFRSGHYVNIVLTMFLRELFTSLWTLLLVIPGIVKHYEYLMIPYILAENPGMDRKEAFQISKRMMDGQKMETFILDLSFLGWDILTVITCGMVGIFYASPYKQATFAELYAFNKAKAYEEGYIRMAINKSMRRVLKALSFDGIEVEASRHLANLKAIDPMKIFHKTIDYKIYNGNHQIPVRIFLPGEKMEDDLPVFLFFHGGGWVTESIDNYERICARLASATDHIVVSVEYRLAPEYPFPIGFYDCYMAAKAMYTNQFILNTDPDKITLIGDSAGGNLAAAVSLMARDQGEFLPKRQILIYPAVNNDYSEESPYLSVRRYGTEYLLTAGKMRDYINFYASAEEDKKSKYLAPLMETDYSNQPDTLILTAECDPLRDEGEEYGRRLKEAGNKVEVHRIQDALHGFFALGVKYYHVQESFAIINRFLSGYTSDENSRKVSPANEEMFEQKRAYWRSLDNAAKLFSAASSPKDTRVFRFYCELKEEVKEEILQEALNQTIQKYPVFLSVMRKGLFWHYLEKSELRPVVREEYKEPCSSLYVRDKKTLLFEVTYYKKRINFEVFHALTDGTGATEFLRELVKNYLYLIHEEDLEPVELSNQYLTVKDQEDDSFSRYYDPDFPRKKKKKIRAVQIKKGGKGYEELQINEASMSVKELLGIAREKKVSMSVLLTAAFICAIHEEMSRMQEKKPVILMVPVNLRKIFPSDSMLNFFGYIEPGYQFGGGKDSFEDVLEAVKLYFQENLSKEHMAGRMNELIAIEKHKILKWAPLELKNRCIRAGAKMAEQEVTAVLSNMSVVKMPEDYAQYIEKFGVYTSTNRTELCICSFQDTLSLGFTSRYDSTNIQRNFYRILKELGASVKVAEPDFPEDARPNYEGKKVLQIFTFCCIAAIVISMMTDIIISPGMHWSVFVAAGCATMWLTMAVGYVKRFNLLKNAAWQLLIMSGICVLWDLGTGWRGWSVNIGIPDICLLIQVVMLIISRIRSLSPREYMIYYVMAAVYSMILPLILLVTGVIHYKTPSVICIGCSFLLLIGLILFKRKEFKEEMHKKFHVGMFKIGDYVAHYKEGVCEVVNIGKIDMGSSDKEYYTLKPVYDAGGTVYTPVDNKRDQIRKLITKEEAENLIKEMPKIDIIGVTNEKQREGMYKNALLHNQCREWISLIKTSYGRNKKRLLAGKKTINVDERYMSSAEKFLYGELAVVMEIPRDKVSGYVKEHLDAELAMKKRITALLLLLTLSVTSLFACTSADKSESASDKTAKTSKSTSTKKQELTPVTLNEVAHSIFYAPMYVAIEKGYFANEGIDLSLVTGFGADKTMTAVLSGTADIGFMGSEASIYTYNEGANDYVVNFAQLTQRAGNFLVAREDIKDFKWEDLKGKKVIGGRKGGMPEMVFEYILNQNHIDPATDLTIDQNIDFGSTAAAFAEDKSDYDFTVEFEPGATNLEKQGKGYVVASLGTDSGYVPYTAFSAKKSYINKHPEVVQGFTNALQKGMDYVASHTPEDIAQAIAPQFKETTLDTITTIISRYYEQDTWKKDLIFRQESFDLLQDILEEAGELKERAPYKDLVTTTYAEKAAKASNDTQKTNMSKQVKGVSEKIEACAKKEFLEKGYVDASLRTIAEEADTTTGSIYSRYGGKEGLFSAIVEPVAREFTEKFVSVQERFDATDPDKQAKQGEVTALIGPSFWMKQRRLWMMIQESLSRLIKNKTVMIIAHRMRTVTDADKIVVLKDGVVAESGTPEELKKKDGIYANMMKTQLMAADWSLMKQKNSFSGQIGFVFAAAGSAVGVGNLWRFPYLAAKDGGGLFLIIYLVLVLTVGFVLLTTDIAIGRKTGKSAIYAYESMRKKWKFLGVITFLVPVLIMTYYAVIGGWILRYIVIYLTSSGKQAVADNCFTSFISSPSSVWYGLIFMFLTALIVYNGVEKGIERVSKFIMPVLLIMVIGIAIFSLTLKTTLDDGTVRTGLQGLKVYMKPDLTGITIGRFLQITLDAMSQLFFSLSVSMGIMITYGSYVKKDVDLNKAVSQIEIMDTGVAFLAGVMIIPAVFVFSGLDGMSAGPGLMFVSLPKVFYCMGVVGRIIGILFFVLAGFAALTSCISVLESITANCMELFHTERKKTTRVLSVIYLIATAVIALGYSVFYVEVALPNGSTGQLLDIMDYISNSFMMPFISLLSAILIGWIMKPSWIAEEMELNGKKFKRKKLYNVMMRYIMPVIMMILFLQSTGVLNLIMKMINQNKNQKERMKLLRQLTVQQLNTLEAASMNNLNKIGNGDRMNTKAEHAAELHQRGCNCAQAVACTFCKEFGISEDDMFRIAEGFGLGMGVMEMCGALSGMAMIIGLDNSQGGTEEGSRTKGDTYKKIRSKVEKFKEKNGSCICRELKGVETGKVLCSCPQCIADAVALTEEYLAEQGKMRLKNILIVVKDIEHSKQFYHDLFGLNTILDNDGNVILTEGLVLQDEKIWKEVLNKDIIPENHASELYFEEPDIEAFARKLEKLYPNIRYVNRLMTHSWGQKVVRFYDPDGNLIEVGTPMMGVQSIDAEDDQFAYRYDTQLLIERRDEDLDEDDIADYITEHFEGNSLIAAGDEDLVKIHFHTNEPWKILEYCNSVGEIFDIVVEDMIRQANGQQGMKEDSSLKFHLQNAKDHGVTQKEIAAVITHVGFYAGWPKAWAVEVPGEETSNEWCEAVSDEEYGKLKMVAVRELIAAIFLVSPCVRKELPVAGHVDTKVCKKSCWRSILRINRDRIMKITSVAVLGAGAVGSYVIWGLADREDIKLGVIAEGERKERLSRQGCAINGKVYHPEVWTPEEAENVDFLIVSLKYGALPGALESIKKVVGKDTIVMSLMNGVDSEEIIAEQIGKSHILPAVIKVASHREADGYHFDPETTLGIIFGEYEAPYESERVKAVKELFAGTGIHYRSTEYAIEEVWCKFRLNVCNNLPQAILGAGVGCYRDSEHMKAIQNGLKKELEAIAEAKGIDISKADRMSGRGSAVPPMARYSTLQDLDAGRHTEIDMFSGALMRMGKELGIPTPYNEYTYHMLKALEEKNDGRFAYTGEEEPTWSKMLKKEEMITLLKNDVVPALGCTEPVCVALCAANAGKMTENKIRSIEVEVNAGIYKNGMSAGIPGCDYVGLPYAAALGAYLKNPEKGLELLEDITPEILEQMKELCGMAAVSVKIKEQEQGLYVKCKIKTEADMITSVIRGTHTNLVYLEKNGKIIYEKNQENGQASDNALIETLKQMTIAQIRQVADTASEEELHFLMDGVEMNERLAAYSENKKVGVGIADTLRSEKGSEVLKNDLLTRIMLKVSSAAESRLDGCPLPTMSSSGAGTKGLVVILPVSEAADALGVSMEKKVRALAIAHLVNRYINAYIGKLSPMCSCVMASSTAASVGIAYLLGGSDEQLGYAVRNMSGTVTGMICDGGKVGCAMKVATGSSAALLCALTAVHDAPLRVSDGICAETSEDCIRHMAQIGNQGMAQTDKEIIHIMEQKKMTEKVKQQHMFSNKMIAGILIPVVLEQLLNSIMGTADTMMVSNIGSAAISAVSLVDSINILVIQAFSALAAGGAIVCSQYIGQQNKKMANESARQVLFIITAISIVVSVLCLGFKKPLLRLIFGSVEADVMRASETYFFYTAISFPFIAAYDSAASIFRAQENTKGPMLISMISNAMNIVGNAIMIWIFHMGVAGAAISTLVSRIFCAVVVLIQLRKDRQPIVVRDYLKIRPDWAMIRRILGIGIPSGVENSMFQLGKLAIQSTVSTLGTTAIAAQAMTNILENLNGMAAIGVGVGLMTIVGQCMGADRKDEAVYYIKKLSVIAEVAIIVSCLLVFALIRPVTVLGGMEPASAKMCFHMVTWITLVKPIVWTLAFVPAYGLRAAGDVKFSMITSCLVMWLCRFCLCVILIRFLGFGPMGVWIGMFADWTVRAVIFTWRFHSRRWLRYKVIMKYVLKKADQTEVEEIFSLYLKRIQWMNEKKNRSVEQQWLSAQFCNRPDMHLDCSIDNPFLNQYYESMGYEMAGTCKDGGDEGNRRENIWHYYREKMNELYELIEKKIKESGYPRQISGADVYDDICDQIDGKENGTYLLLSKFEDDVIFEYHITINDEDFNLGVLTMKTPEGTFEVDFDKMEKSLEPSIITVLGTVVFRVIWLLTVFKMVPTYEMLMNVYVASWIFTGGLLLLIYLKHMRKLEKKAIKMKNILMIATGGTIASKEGDLGLTPAVTGEELAASVPGIKDICHLEILQLMNIDSTNMRPRQWLMIRDAIMENYNHYDGFVILHGTDTMAYTAAALSYLIQDSVKPIVLTGSQKPMANPYTDAKINLFQSILYAADDLSCNVCIVFNGKVVAGTRGRKQRTRSFDAFDSMNFPELAIIRDSRIIRYYTEKRPAPQDLKSYASLNDRVFVLKLTPEVKAEIFDLLSGHYDAIILETFGIGGIPEYDDSFEKAIFSWVDSGKTIAVTTQVPEEGCDLGVYQVGKKFNNHKGILKSDDMTTESIVAKLMWILGQTDKQDEIARLFYREINHDRVMKDVKQSTRLRPLTNQELIDSYDYLSGAASSQDCTGLIPSAPLSEAELDSYEELYPFLPPVPPASDIKDNNEAPEDTSDITGWKAEKGLDEMCADTWRWQSQNPNGYESMEKKNEKGKVQLKGQLKLYIQWPAIMSLLLIAMDLWVYKLDHRAGILMAVFVVVYIIMVGGLYFYSKNIIMKDLVEFAAQYGIVQNTLLRELSIPYAILLDDGKAIWMNDEFEAILGGKPKGEAYISKYIPELNRSIFPKEDQQTVTMEVYYDDKEYQAEIRRVSVEGFSDTEQLMELPKEKEYFIAVYLQDVTEFNRIIRENEEQRMVAGLVYIDNYDEVIDSVEEVRQSLLMALVDRKINQYIAKVDGIVKKLENDKYFIIIRKSYFKQLEEDKFSLLDDVKSVNIGNGIPATLSIGLGLSSDSYAQSYNYARVAIDLALARGGDQAVIKDCNGVTYYGGKREQTAKNTRVKARVKAEALREFITVKDKIFVMGHKLTDVDAFGAAMGIYRAALALEKRAYIVINEVSASLRPLYELFEQDSNYPDDLFLTSSQAMNMADENSMVVVVDTNRPMMTECEELLKTTKTIVVLDHHRQSSDNIDNALLSYIEPYASSACEMVSEVLQYIVDGIKIPKIEASSLYAGIMIDTNNFVNSTGVRTFEAAAFLRRCGADITLVRKLFRDDMESYRAKAEIISSAEVYHNKFAIARGVDLHIESPTIIGAQAANELLDISEIKASFVLTEYNGRIYVSARSIDEVNVQIIMERLGGGGHMNASGAQFNHTDMDEAVACLKQVIDEMIEGGDLMKVILTEDVKSLGKKGEIVNVSDGYARNFILKKNKGVEANGKNLNDLKLKKANDDKIAQQQYEDAQELGKKIEAGKIEVAIKMGEGGKAFGSVSSKEIAEEVKKQMDLTIDKKKVQLKEAIRTLGTHNVPVKLHPKVTAELKVVVKEEAMEEALIKRVMPHSIEAEQSVVGAMLMDKDAITTAGEIISGDDFYQASYGVIFDSMIELFNEGKPVDLITLQERLKEKDVPAEIASLEFVRDLVTAVPTSANVKYYAQIVADKSLMRKMIKLNESIENMCYAGKEPVESIMEQTEKSMFQLLQRRTTGDYVPIKQVVLNALDKIEKASKSKGTVTGIPTGFIDLDYKLSGFQPSDFILIAARPSMGKTAFVLNIAQYMAFKKNKAVAIFSLEMSKEQLVNRLFSLESQVDAQSLRTGNMKDSDWEKLIEGAGIIGQSKLIIDDTPGISISELRSKCRKYKLEHGLDIIIIDYLQLMTGSVGRSSESRQQEVSDISRQLKGLARELNVPVVSLSQLSRAVESRPDKRPMLSDLRESGAIEQDADVVMFIYRDEYYNKDSEFKKQAEIIIAKQRNGPVGTVNLAWLGEYTKFANLSRQEDSFMGNHMNTLEQIKRETRDDARLYACIRDLYDQGVSLSDLKALIPDIRRTREQLQLKRMLQNNNEVLMAMFSQEMSFLLDAKERHEELEFKKLDQLIRQQQSFRKASAETGPVKKLKRIFLSAMAHVIGDECVSCGSCEAECPVGAIAQGADHYEIDADACVDCGACAAQCPVGAISEGMKKNRIIAMLLGTALLVCGCQQTSKATDEEKKIESEKNTTKTEENAYQGKLDLITPAAYNNTDGLKLKKGDYISIIGKANGAQYWDEVKKGVAQAAEDINTNLGYTGKDKVKVAFNAPDTADNVDDQVNLLDEELDRYPVAVGISIVDLQACQVQFDLATDSEIPIVTFDSGSDYQGVAADVSTDNVAAGKEAAQRLAEEMGDSGEAVLFIQDSKSQAALQREKAVTEELKANHPNISVVNVYHMDELSNMQKTVSDEINAGTYRPKDSELPEGQLTGEDVVTADSITEDQVVDYILAKHPNITGCFAANGDSVKLAVDGLERNKMEKKVKVIGFDANDDEIQDLKDGKVNGLIVQNPFGMGYATVVAAARASLNMGNEAVVNTGYTWVTKKNLKTDEVQKILYSKMKSTLYLKFIFIYIVFGFLSLFTAATLTENLVSTPIFNRVSNSMYREATMVANDYLPGYFSGGLTESDAQMILSGIETQLDAAVWFVSKDGKVILSAQSGNYPSAPDSIKDFDPAESGSDRSQTGDYHGYFDNDVITVTVPVTYGYFPKGYLMIHQYTSVVDTMTDTLMRGVYITFIVIFLLSFIILLAFHFLVYRPLHKITEAATQYASGNLEYEIPVTTEDEMGYLSASLNYMSSQLRDMEDYQKKFVANVSHDFRSPLTSIKGYVEAMTDGTIPPELHEKYLKIILFETERLTDLTQDLLTLNEFDTNHLLLNREVFDIHEMIKHVAASFEGVCTQKKISIELVFATKHLNVNADKRKIQQVLYNLLDNAIKFSDPDSIVTIETTDRGEKVYTSVKDNGMGIPRSALGKIWERFYKSDLSRGKDKKGTGLGLAIVKEAIQAHGENITVVSTEGVGTEFSFSLPKVAGMNKQKILIVDDDENIAELVSLYLTKECFDTMMVHDGERALVAFDTYKPNLILLDLMLPGIDGYQVCREIRTRSNTPIIMLSAKGEVFDKVLGLELGADDYIMKPFDAKELVARVKAVLRRYQVGSKPETPQADKGKCVEYPGIEINLTNYSVIVDGHTVEMPPKELELLYFLASSPNQVFTREQLLDQIWGYEYIGDTRTVDVHIKRLREKIKDHNGWSLSTVWGIGYKFEVKMNKKTLTKLEYHKIIDILIEQATSFGGKERCKRLKPMTSITDIEAAQEQTAAAFTRIIKKGRPSFGSCNPVGESLKRLEVGAALGSGELLRICKLLENAGQIKAYGRHETVDDAEDCLDAFFQQIEPLTLVSTEIRRCIIDEDEISDDASSTLKQIRRSMNQINDKVHSTLSSLVNGSLRTYLQDAIITMRGDRYCIPVKAEYRSQVSGLIHDQSATGSTLFIEPMSVVKLNNDLKELYGKEQEEIQVILARLSADVAEYIDSIRTDYKVMTELDFIFARGNLAINMNASKPIFNTEGRIHIREGRHPLLDKKKVVPITVTLGDTFDLLIVTGPNTGGKTVSLKTVGLFTLMGQAGLHIPALDRSELAIFENVYADIGDEQSIEQSLSTFSSHMTNIVSFLKHVDEHSLVLFDELNAGTDPTEGAALAIAILSYLHQRGIRTMATTHYSELKVFALSTPGVENACCEFDVETLSPTYRLLIGIPGKSNAFAIAGKLGLPDYIIEDAKTHLTEQDESFEDLLTDLETSKRTIRKEQEEIEHYKRELARLEEETRQKRDKLEEQRDRIIREANEKAHEILADAKETADETMRNFHKFGKANISVAEMEKERERLRKKMNATQNSMKTDTKKPKKAYKPSDFKLGESVKVLSMNLTGSVTSLPDSKGNVTVQMGILRSTVNISDLEIIDEAPAYSFAKRTRQTGKGKVKMGKSLAISPEINLLGKTVDEAIAELDKYLDDASLAHLSSVRIVHGKGTGALRAGIHKYLKRQKHVKSFRLGAFGEGDAGVTIAELKMDEQKPLENKQGEPGEKTEKSEYSFMQETIKDENSRGKKCRKDLLRMAGLGVVFGVCACISFSALKPWLDKKFPGDSQEVVIPKEKEEDNTEEKKADTSNNTEQTLDIDNYRELQKAMNDVATEAGKSVVEIIGVSGEQDWTDESYDNKNSVSGLIIADNGQELLVYGKTSILKDAKEIHIRFSDGNTEQASVKKKDESLGFAIYAVSGSSIEQSTWTQISTAKLGSSNSVQKGDAVAVLGKPFGYAGAVGFGTIANSRNELDADDGSYQLLCTDIGAAEDGTGVIVNLSGEVVGIIDQSISDNSSKRLVTGYGISGLKSEIELLSNGQAVPYVGIRGLDVTAEIEAQGIPNGVYVQTVEPDSPAMAAGIQSGDIITEAAGKKISSLAVYQSVMRDQKSGSKIRLKGQRQGSGGYVDISFDVTVGSKEMRYINTLHEGETIRNVYLCKGKRSAETRNGRPYDNLILQDKTGTLDGKVWDPNSGGIADYDEMDFIEVYGEIISYNNNLQLNIKQIRKAQEGEYIAADYMPTTEKSTDGMYEELLGYIKKVENQYLRQVLEYYFVKDETFIRNFKGHSAAKTVHHGFAGGLLEHTLSVVKFCDYMVGAYPILNKDLLFTAAICHDIGKTKELSSFPENDYTDEGQLLGHIVIGVEMIGDAVRNIPDFPEKLANELKHCIVAHHGELEYGSPKKPALAEAMALNLADNADAKMQTLTELFKDKKGNDWLGYNRLFESNIRKTVIMMQKNEIVKVKIEDIGVGGEGIGKVDGYTLFIKDAIIGDVVEAKVMKAKKNYGYARLMNVLTPSKDRVEEPVCPMARKCGGCQIQEMKYPAQLAFKESKVRGNLERIGEVPGELLDQIMHPAVGMDGEGMQPFRYRNKAQFPIGTDKDGRVIAGFYAGRTHSIIENTDCALGVEVNEEILNCILDFMEEFKIPAYDEVKHKGLVRHVLLRYGFKTDEIMVCLVINGKTIPHCHDLVGRLRQIPGMTSITLSTNTAKTNVIMGDTIRLLWGQEFITDYIGEIKYQISPLSFYQVNPVQTEKLYGLALDYAGLTGNEAVWDLYCGIGTISLFLAKKAKQVYGVEIVPQAIDDAKNNAKINDITNAEFYVGKAEEVLPEYYKEYEKTHNGETAHADVIVVDPPRKGCEESLLQTIVDMQPEKVVYVSCDSATLARDVKFLRANGYELKDVTPVDQFPHTVHVEVVCCLHRVNSMSVLFFYLKAKEKIKNGKEERNLWWKSRLIIMNTAFAWKTMMGLLLIFIQSMQQTNRSRHRHITSFQVISLGFLSVILLGSLLLMLPIATKSGQCTSFLDALFTATSAVCVTGLVVNDTATYWSLFGQGVILLLIQIGGMGIITIAIAIAVVSGRKIGLMQRSTMQEAISAPTVGGIVRRTQFIIRTTILIEIIGAVLLAPVFCRDFGFWKGIWYALFHSISAFCNAGFDLIGIRTPFSSLTSYSVQPIVNLVIMMLIIAGGIGFLTWEDIKNHKWHFKKYRMQSKVIFMVTGILIFLPALYFFYFEFSNVPLTERVWVSLFQSVTPRTAGFNTADLTLLSEVGQMLIIMLMLIGGSPGSTAGGMKTTTLAVLVSSALSVFRKKEHTNFFGRQIPDDTIRNAATIFLMYIVLFLVGGMVISRTEDIPLMTALFETASAIGTVGLSLGITPDLGLVSHIILICLMFFGRVGGLTLIFATISEKKPNGSKYPQEKITVGMKSILIIGLGRFGRHIAMKLDELHHHVMAVDKEDTRVDAVLPFVTNAQIGDATNEDFLGSLGVGNFDVCIVAIGDNFQNSLEVTSLLKELGAKMVVSRAARDVHAKFLLRNGADEIVYPERQLADWVAIRYSADHIFDYIELDEEHAIFEISIPGEWIGKTIGQLDIRKKYNVNIMALKTNDIMNLKISSDTQLLKDSTMLVLGETKHIQKCFHIMKDFVLLIVVLAAFIYGYFLMEKLDKFLKENQSQKLISDSKLRIGFETPAIIDSIADLLEQFSSEYPNYELDLFYGSVSEIINGLGNNKLDFGFIIENSNDILKDEYCSLSLQIKQSVITPGSIDIAVHPINTIEKPARVIWQNDINCMKGLFVEKLRDFSERFLLSATRPNGKKEEKVVMSESRHNPDQLLKEIQADEENRNKGHLKIFFGYAAGVGKTYAMLEAAHMEKQQGIDVVAGYVETHARPKTAALLNGLEVLPTREVFYNGMILDEFDIGMALKRKPQLILVDELAHTNAEGCRHAKRYQDIKELLNAGIDVYTTVNVQHIESLCDTVASITEIVVRERIPDSIFDNADQVELIDIEPQDLINRLNTGNVYRQTQEKQAVGNFFTIENLTALREISLRRCADRVNILTENTRIKNHGDYHTGEHILVCLSSSPSNAKIIRTAAKMASAFKGEFTALFVETPDFSVMSEENVKRLRSNICLAEQLGAKIETVYGEDVPFQIAEFTRLSGVSKIVIGRSSATKRHLLSKPTLTEKLIDYAPNLDVHIIPDTVSNAAVYQLRGGRKKNHIVFSVTDTLKSTAILILSSLVGMIFRKFGFDEANIITVFVLGILVTAVITKHQIYSLIFSIVSVLVFNFLFTEPQFTLQAYDQGYPVTFIIMFLAAFLTGSLAIRIKNQAKQAAQSAYRTKVLFDTNQLLQQAKDKNEIVSATSNQLIKLLGKDIVFYLADGEVLDTPHIFSVTEENLESCISENEKAVAGWVLKNNKRAGATTGTLSNAKCLYLAVRSSSMVYGVIGIVMGEIPLDPFENSILLSILGECALALENEKNAREKQEAAILAKNEQLRANLLRAISHDLRTPLTSISGNASNLLSNSDSFDNDTKKQLYMDIYDDSMWLINLVENLLAVTRIEEGRLNLRITEDLMDDVITEALHHINRKSEEHHISVESKEEFLLAKMDAKLIVQVIINIVDNAIKYTPKNSHIVIRTEKRGKQAIVSISDDGNGIADEIKPRIFDMFYSGANQIADSRRSLGLGLSLCKSIINAHGGELTVSDNLPHGTVFTFTLPAGEVKVYEMNKSLILVVEDDTSVRNLITTTLKAHEYRYLTAPDGQSAILETSSHNPDIVLLDLGLPDIDGVEIIKKIRTWSNMPIIVISARSEDTDKIDALDAGADDYLTKPFSVEELLARLRVTQRRLSMMQKVSPAEAVVFVNGKLRVDYAAGCAYLNEEELHLTPIEYKLLCLLTRNIGKVLTHTFLTQSIWGSSWDNDIASLRVFMATLRKKIEKEPNSPQYIQTHIGVGYRMLKVDMETERKTLTQLSVPICLETLFYMLSGMVDTLMLSSVSDQAVGAVGTANTYIGVFIIMFGVISSGMIAVMSQNIGAGRPGMHIRQGNLDLYSMYMSVVLATFSGGILRIVSIAPALLEPAEIYLRIVGGTCFLNALIPIFSSYLRVFGYTKHSLIGTVVGNVLNIILNSVFLFAFNWGVMGVAVATVISRVVNLIIVAGMGAVLIKAKQSPERITSRKIFAQIVKIGFPSALETALYNIAMTFIVCFMNQMDVDGMNVTARSYAVQIANFSYCVGAALAQANAIMTGWRIGAKEFEECNRGTRKAAIYGIITATCFSVTFAFAGHFIVHIFTDDTQMINLVVKLLIVDIFLEFGRVTNLVYGQALKTSGDALFPVILGAIFMYLFAVGGTYFLGIHMGLLAVGAYIAMAGDECARAVGMVLRWKSGKWKSKGLVEVMYFELKENKPHGTKDDPFSTYHIKNEGRSFQIPVHWHDELEIIYVKIGFLTVSISGENYIGTPGDAFVVLPGNLHFMGSQTGTVDYFTFLFPLKYISFCINDMLDEKLLEPLKNGHLMISPQVKDTAKELCEQLVEIYVAKNKKTESQITAQIKTKIILLQFILEMWEKGFVIENDKSGRNTIEKEMISYIQQNFMEKISLKEFGEQFHLSEKYISRYFKEHFHITLSQYITHLRLEHAKQLLQDTDTPVTEIAMQSGYQNVSYFIRSFKKTYGVSPLKYRKKMSMGNKNKWWRNAVVYQIYPKSFQDSDGDGIGDIPGIISRLDYLKKLGIDAIWLSPVYRSPQDDNGYDISDYQDIEPMFGTMEDMEQLFAEAKKRGIRIMMDLVLNHTSDEHRWFLEAKKSKDNPYHDYYVWRDGEEGVYPNDMNSAFGGPAWEWVPELGQYYFHQFSVKQPDLNWENPKVRRELYDMILWWMEKGAGGFRLDVIDQIAKEPDLKITNNGPKLHEFLRELSRETFQKGDMITVGEAWGATPEIAKKYSNPDGSEFSMVFQFEHIMLDQEEGKEKWDTIPLNMVKLKKCLAKWQNTLYQTGWNSLFMNNHDLPRIVSRWGNDGKYRKESAKMLATMLHGMQGTPYIYQGEELGMTNVQFDSIEEYEDIETLNMYKERLEKGYQPEEIMHSIYARSRDNARTPMQWSGEKNGGFTTGEPWFAVNPNYTRINAKEAQEDENSVFYYYQKLIRLRKENPVFVDGKFDLLLPEDEKIFTYTRTDEYTKMLVCANFTDEEVSCPLLDEWKDGEVWIRNYEDDREGNVLRPYEAVIIGTAANIVKAGMAKIRKKPKKSINKNINKKSFTQSTPNIAEKLDNEMVAFLDTEFLTSQIKGGPPAKLVSVGFVVCGKNFEEVTRFHSYIYAEDKLHDRFQEMTGIERKDLLSAPDYELVMEEVAEQLEAWEVSRIYVWGPDKYVIQRDLLEYRKDASKRTKKIVNRILRMIKDIEDIYSAKLDLQSAGIGSLKILCGLGTEVSHNALDDAVDLKNIIKHIDLEGCSEHMLQIMKKYTAEKEVYYRQRRFREKWEDVSEEIQKKTLGLLKELGKVDTVEARALRDDLMVMCTGEAISFPTLEEYIRKEEKEMKKKLAAVMICAAMVAMLGVGCGSKSSDDSSSKSETKKTLTEDDIKDSMKGVKLKVGTTGLFGPFSYYDEDGKTLIGYDLDLINDLQDLLGFEIDGGIQAMDYSALTTSLAENKLDMGAAALCATDERKEVMKFSDIYCDSGQVVMVNKSNDEGIKSVDDLKGKKVAVEKGTASHTYASKNLSDADLEVHDTITTAYESLEQKKVDAVIQDGPGANFYIKTTPDSNLEVVGDEFNQGQAPYCVAISKECKYYDEINAAVKVLIKNGTTDELYAKWCEMDMKFLDVLLPMMFEGLKLTVLIAVVGIGIGFLIGSLCGYLLQSKYKVGKAIAEVYIWIIRATPLMVQALYGYFVIPKLVGVDISSTIVGIGVIALNSGAFISEIVKGALMGIDSGQKEAGASLGLTSSQTMLHLIIPPAFKSALPALFNQFITSVKDTALLSAIAVNEITHQAQAYAALSFKAIPTYTALAVFYLIILSILIIVQKQIERKMRMIKISHLSKKFGNLEVLKDINLDIEEGEVVCIIGPSGSGKSTFLRCINQLESPSGGIVEYEGKNLLDKKCDIRKFREEVGMVFQRFNLFPLKTVAENVMMAPVLTKHMNKEEAHEKALELLDKVGLKDKADVYPSTLSGGQQQRVAIARALAMEPKALLFDEPTSALDPELVGDVLDVMKSLAKEGMTMIVVTHEMGFARDVADRVIFMADGYVVEEGKPERIFTAPKERRTQTFLSRILPATAMKDVQDFQIEWRVLLAVTISGLIYNLGLLAGPWFEGKMTGCLVDILKGTKQSGVMLYLVTDYVAVIAAVAGPAILLLDEITANLDAETEQNVLMALKKVSKDRKVISISHRMTASMGRTIFISMTKGKPQTTKNNTAQENLTERLERKETVRGTALTITGGFLWGIAGVFGKYTFEYKGVTATWIVNVRLIIAGIILLTRAYMVQKDGIFRIWKNKRHVLRMLVYGVIGIAGCQMTYYLAVEDSNAGIATVLQYTAPVMIMVLLALKNWKLPGKNEILALILAFGGTVLLATHGNLTQLSVSKTTLIFGLSSAVATIFYNLVPGNLMNIYGTFPMVGWGMLISGIGLTPFVQPWTLVEDITWDWQCIGCIVVVIIFGTVMSFSCYMEGVRLIGGSKASLLASVEPLTATAMSVIFMHVAFSGMDLAGFVGIIAGVIILSLPKKKMLNGLNNIVNFLNGYIWGVGMLVLIVGSGLYFTIRLHGFQFVHFKDMWSRIIDKQDSDSGISAFGSFCTTMAMRVGTGNVAGVAVAIYMGGPGALFWMILAGMTNSAVCFAECTLAVLYKTRIDGQYRGGGAYCAERGLGWKKYGTFMALILMIGTSVFMPAAATYTICDGFHNAIKIPMWVSALIIALILAVVVIGGVKRISAIASMIVPFMVTVYLIAAVVIIVMNITAVPALIKTVVTAAFAKNAVFGGTIGVIIQQGVKRGTFSSASGMGEASPTAAAAETSHPVKQGMANAAGVWLDTVIVCTASGLMILLTDCFNTAGGYVGSGSTELPALAAAGTNGVIFVQLACKTVMGKIAPTFIAIMLALFSFTCLISYYYEAETAAMYLFQGESKAKVRKVVTWIMRIAMPVLIFIWGNLESDIAWNLSDLALGSCTWVNMLIVLLLSPKVIALYKDYEEQMKAKKDPYYNPDKISWSGVDKEMWKDINKKYIENGKMSKILIVEDEEAIADLERDYLELSGFTVEVANDGDIGLQKALNEDYDLLILDLMLPGTDGFDICRQVRDVKNTPIVMVSAKKDDIDKIRGLGLGADDYMTKPFSPSELVARVKAHLARYDRLTGSAAEKNKVIEIRGLKIDTTARRVWVNGEERTFTTKEFDLLTFLASHPNHVYSKEELFREIWDMESIGDIATVTVHIKKIREKVEVDTSNPQYIETIWGVGYRFKVMKLKTRLVIAFFTIIIIPVFMAAMMVSMVCHYQIGVVEKNYGITGTTISDFTNSMQVLARVTEKPYHELKDMSEQASEMEDATELDQFNKKLENKNAYLLVRKDGTIVYTGSDDDRVKAVIEQLPGYGDTDTTSENGIYLGGDAEALVKQVDFRYDDGNKGSAFIVSDVSNVIPEVGHFFYEILIGIVVILILTSAALIIWIYRAVMGPIGKMQTAAQNIKDGNLDFELKPEADDELGKLCQSLEEMRGRLKESAEEKLKYDKESKELISNISHDLKTPVTTIKGYAEGIIDGVADTPEKIDRYVRTIYNKATEMNTLINELTLYSKIDTNKIPYNFNIVSANEYFNDCADDLSVELAAQNVGFGYFNYVEKNVRIIADPEQVKRVIHNIVNNSLKYMDKPKGMINLRVKDVGDFVQIELEDNGKGIAAKDLPNIFDRFYRTDASRNSSTGGSGIGLSVVKKIVEEHGGKIWATSREETGTTMYFVLRKYQEVPVNEMERRLFTSESVTEGHPDKMCDQISDAILDALMAQDPMSRVACETATTTGMVLVMGEITTNAYVDIQKIVRDTIKEIGYTRGKFGFDAETCGVITAIDEQSTDIAMGVDKALEAKEHTMSEEEIDAIGAGDQGMMFGYASDETPEYMPYPIALAHKLSRKLTEVRKNGTLPYLRPDGKTQVTVEYDENGVPARLDAVVLSTQHDPEVTQDQIHKDIKKYVFDAIIPEGMVDEKTKFFINPTGRFVIGGPHGDSGLTGRKIIVDTYGGMARHGGGAFSGKDCTKVDRSAAYAARYVAKNIVAAGLAKKCEIQLSYAIGVAHPTSIMVDTFGTGAVEDDKLVEIVRENFDLRPAGIIQMLDLRRPIYKQTAAYGHFGRTDIDLPWEKLDKVEDLKKYLMEQYIIKGGHPLVGEVEIGGAKNAALAILAAAIMTDETVLIDNLPDVNDINVLIDAIEGIGAQVHRVDRHTVKINGASIKNVDIEYDYIKKIRASYYLLGALLGKYRRAEVALPGGCNIGSRPIDQHLKGFRALGADVDIEHGKIVAEADRLVGKHIYFDVVSVGATINVMMAAAMAEGLTILENVAKEPHVVDVANFLNSMGANIRGAGTDVIKIRGVQRLHSTEYSVIPDQIEAGTFMFAAAATRGDVTVLNVIPKHLEATIAKLVEIGCEVEEFDDAVRVVSKGDLTSTHVKTLPYPGFPTDMQPQIGVTLALCKGTSIITESIFENRFKYLDELARMGANVKVEGNSATIEGVAEFSGARVSAPDLRAGAALCIAGLAADGITIVDDIVYIQRGYERFEEKLRSIGGIIERVDSEKAIQKFKLKVGMADNNIIFIGMPAVGKSTVGVVIAKRLGYKFVDTDILIQESEGKLLKDIIADVGPDGFLKVEDRVNAQVKAERTVISPGGSVVYCENAMKHYKEIGKVVYLQASFETINSRLKNAKGRGVVLRDGQTLKDLYDERVKLFEKYADITVCEDNQKLEDTIESVLDALGEMENKLPFYMAYPVPLLYNDDRNARRDYDYMKSIYPDTAKRVLPYMEEECDRMEYDGSMMYDEYPDRLQLRLMCRRIYDKAEKEEENPGAWLMDLIEVMTYQELCRRRVEHREIRKKIYMLEKANEYIRQNYIDEKEKPLFHVTPEAGWMNDPNGFSVYQGKVHLFYQFYPYKTEWGPMHWGHQVTEDLLKWEAYPVAMAPDQDYDHIGCFSGSAVEADGKHVLLYTGVSQKDGKEIQNQCIAIGDGKTYEKWQDNPVIKGDIMPEKFDRKDFRDPKIWKKDGRYYCVVGNRYEENCGQIVLFSSADYKNWRYEKVLLRNDGKNGDMLECPDYLEVDGYPVIICSPQNMHAQKYEFHNGHNSIYIIGDAEKEISDFAWEKKRSLDYGLDFYAPQTTELPDGRRIMVAWMKSWDARVMTKGQKWQGMMTLPRELKIKDGKIWQSPVRELEKYKKNPIIYTEQKISGQMSLDGINGRVIDMTVELTNVEGREFKVDVAHNEEYTTTFTYYPEKHQIEIDRTYSGVNADVVCVRKIEIAEKHHAPKLHFIMDRYSVELFINDGEQTASVVIPTPLEANEIIFTSDEAATVNIEKYEITFNMSFIEFKNICKKYAGNDKNSVTDFNLDIEEKEFIAFVGPSGCGKSTTLRMIAGFEEITSGDLFIDGKRVNEVAPADRGISMVFQNYALYPHMTVEKNISYGLKNMKVPADEIKKKVDWAIDILGLEEYRYRKPKNLSGGQRQRVALGRAIVKDQKVFLMDEPLSNLDAKLRVSMRNEISKLHRNLGSTTIYVTHDQVEAMTMADRIVIMKDGVIQQVGKPMDLYEHPVNKFVAGFIGSPQMNFYDVKVDGKKLIFADGNTVELPEAIAKRIAGYSEVIMGIRGEDIKFDITNLDVYGSHQKAVIDNTEIMGNENNLYFDFGGSVTIARVSKYEVSQVGDEVEFTFMPHKMHFFDKETEQVIGAEMLTKKQKRNNWILTVVLLIVSLLFLFPVIWMLANSFKPDAAITADMNSMAAFIPPALNGNFFENYVSVLTNTGFVRYMCNTLFYAAILIVLGVIVNGLAGYALAKINFPFRERWLLIIMLLMIVPMETIITIHFLIIAKLGLLNTVLGYVLPMIVNPFNIFLFRQVFLGLPDDVYEAAQLDHCGPVKYFFTMVLPMSKSVVATVSVFTFLNVWNDYLWPSLVFTSSDLLTAQIGLNAITSNDNTTTGQTLAVITMVTIPVIIIYSLFSKQIVEGVISTGSKEGMKKRTESIMGMAFFGPALVLLTIFLFLPMILTLIFSFTDFFALNPGLTHFVGLDNYIQIFKDDVFSQAFFNTVKFVIIIVPLQGIGALVLALLINKVTHCKKYFKVAFFVPVVMSLAVVSTLWIQIYSPEGIMNAILSFFGIDAQPFINSASQALPSIAIMSAWQGMGYQMIIFLGGIQAINPTLYEAAEMDHATTWQKFKDITLPELKPLCVFVLITITIGAFRMLVQPMVMTGGGPSNSTYTVVYDIYETGTVNWEIGLASTMAIVFAFFVMILTVIQTIATRDKEDQNVNKKAKKKMKKRTVGVLLAAFFAMALTGCGDKQPQPGEVKGYDKGEEYLSIWVHSIEDTEEGQCYRKSVDAFNKKYDGKYFADIEFIPRNDSGGGYSDKINASVMSGDLPDVLTVDGPNIAAYAENGIIQPLAKLTDEEKSVYLDSIIQQGTYNNKLYALGAMESSVGLYYNKDILAEAGVEVPDADHPWTWSEFTEVLKKVQPVVEKKKGYALDMTFPTGEATIYYYAPFFWSNGGDFVNKDGLKVNGVFNSKENLETVNYFKSFLDNGYMSKVQITDLFESGRAAFKFDGAWEVNTIYNNYPDVNLGVAPYVVSDNWDGGRYTPTGSWAFAASSKTKKLKGATKLVQWMSGVESGKRLWDESKSFPSTYEAFESSPIFEEDENYKALYHQLSKYGHPRSKTPVYPQVSASVQEVLENSVLTDKDAKTELDKSVERINAKLKRYVMKMKQKKVTFADIAAYTGFSKTTISRYFNNPDSLTLENQEKIAHALDVLGYQENKLAKVLANGKSEFVGIIIPNLYLHYYSEMLNQLLSTYEKYNYKFLVFIGNNKKEIEEKYIHELMAYKIEGLIVLSNTISSEELASYKLPVVTIERECDHVCSVSTDNYLGGVQATSLLIRNKCDVILHINSIFPDTLPTYGRIRGFEDICNEHHVVHELIQRNLGNTYQETLTQLKNIFNEIEEKYPSQKKGVFLANDTYASMFLNLIFQKYGKLPKDYQIVGFDDSPIASEAILPITTVGQQIEKIAQTAMELLVLQMNEMKKRKPAPLKEPVHKQITPVLIRRDTTDMGKLVKKKLEKGKSIEQIADELEEDINVIQKTAEELMKRNEKNLPKMLTKKNKRMVRKMKKYIKTFPLTEKEIDQMIEDITGMAEEAQERNENFETVLGKSVHEFCDDLIYSVGGIRAPGGRKLIRGTSIYFQLLGLWGIVGCLINVCFLAGERVHTLWMLAISIGIWYLGHYGEANCNNTEKTKQLTAGIVIYMGVDLLMYCNEIIIAIDNGKAFLKTSDFPILIIGIIVNFGPAILYLVGARRNRPAGEQIKVENRMYDKSQLMKGTLEGCILQILSETVTYGYEIVTTLTEFGFEDVKEGSIYPLLVRLEKKGMISSELRPSPLGPKRKYYSLTDEGEAYLQEFIKCWTEVQSSVNRILKKEEMASTQVTPTRMELTRTKKKLVTAIKGHKLLKDKRDELMRQFLDLVKVNMELREKVEAGIRSANKNFVIAKAGMDEATLNTALMAPKQEVDLEVGQKNVMSVDIPVFETKTRTADANDIYSYGFAFTSSDLDGAVKSLADILPDMLKLAETEKACQLMAAEIEKTRRRVNALEHVIIPEAQKNIKYITMKLDENERSTQIRLMKVKDMMLEDAHHYKEKEMPKEYRTIQEVAGPLMLVRGVENVAYDELGEIELASGEKRRCKVLEINGNDALVQLFESATGINLSNSKVRFLGRSMELGVSEDMLGRVFDGLGRPIDGGPEILPDERRDINGLPMNPAARSYPEEFIQTGVSAIDGLNTLVRGQKLPIFSASGLPHANLAAQIAKQAKVRGSNEKFAVVFAAMGITFEESNFFVESFKETGAIDRTVLFVNLANDPAIERISTPRMALTAAEYLAFEKDMHVLVIMTDITNYADALREVSAARKEVPGRRGYPGYMYTDLATLYERAGRQNGKKGSITLIPILTMPEDDKTHPIPDLTGYITEGQIILSRDLYRKGIKPPIDVLPSLSRLKDKGIGEGKTRADHANTMNQLFAAYARGKDAKELMTILGEAALTDIDLVYAKFADAFEKEYVSQGYDTDRPIEETLEIGWKLLSMLPRSELKRIDDKFLDEYYGKQMSTGTIKKVAGPLVIAEGMRDANMFDVVRVSSQRLIGEIIEIHGDEASIQVYEETSGLGPGEPVESMGVPMSVELGPGLITSIYDGIQRPLDDIMKISGNNLKRGVEVASLKRDKKWEFVPVAKAGDEVEAGDVLGTVQETIVVQQKIMVPYGVKGTVKEIKAGTFTVEEVVAVIATEKGDKELTMMQRWPVRKGRPYQKKLPPVKPLVTGQRVIDTFFPIAKGGVAAVPGPFGSGKTVIQHQLAKWAEADIVVYIGCGERGNEMTDVLNEFPELKDPKTGQSLMERTVLIANTSDMPVAAREASIYTGITIAEYFRDMGYSVALMADSTSRWAEALREMSGRLEEMPGEEGYPAYLGSRLAQFYERAGHVVSLGKEGREGALSVIGAVSPPGGDISEPVSQATLRIVKVFWGLDSALAYKRHFPAINWLTSYSLYVDNMANWFNEEVAADWMEDRQKMMTILQEEAELNEIVQMVGMDALSPTDRLKMEAARSIREDFLHQNSFHEIDTYTPLRKQYLMMKLVLAFYEKSVDALNKGADMNALIAMPVREKIGRYKYTTDADIESEYKNVEEELDKEVAAAFGKEDFMYKIAVVGDYDSIFGFAALGLDTFAVQTREEAAEKLHQLAQGGYGIIYITEKLAAELTHEIEKYQEQVTPAIIQIPGIAGNTGAGVAGVKKSVEQAVGSDIIFGSMSEQYTYAVARIRALEVSLFSDSTIDQLIACQNYDQALQFLEEKGWGDAESSGDAEKILTREEEKTWEVVKELSIGMEHFDVLSYPKLFHNLKAAVKEVCTGDKNRHIYYEDVRIPGEEMRKIVEDRDFGKLPDSMRIAGEKAYETLLHTGDGQLCDVIIDRAALDAIYQAGKESPDKIIQDYAESTVAVADIKIAVRSQKTAKSTDFMKRAMAECDSLSVSQLSKAALSGMDAICEYLRGTAYAEGADALAESPSAFERWCDNRIIQTISPEKYHAFTIGPVIAYVIARQNEIKTVRIILSGKQNELPDDSIRERVREMYVMAGLDKIKSQILDEAKVTADAKIEDAKAQAEQMKLKAQEEGARQADTILKKSEADTASQKERVKSAIDLQRRTRLLEAKQEMIAEIIEKAYEKVINLAPDDYYQMLLSILEVYILPQEGEIYFSVKDLENMPVGFGKEIEEIALAKGGKLTVAGAGRDNIDNGFILAYGGIEENCTIRAMFDAKRDELSDIVHRLLFVMSIWNDMGMVYALLGAAVAVFLAGAGSAIGVGIAGQAASGVVTEDPSKFAKVLIMQLLPGTQGIYGLLVGFITLSKIGLLGGGAADLDPKTGLLILAACLPIGIVGLISGKAQGQTAAAAIGIVAKKPDQFGKAMLFPAMVETYAILALLISILSVTAIQVMAVLQMQRISICALKHDRKAILEKLQSMGMIEMHQVAQDEAGFEKMDTQSAKSSFEKRVQITENALDVLNQYTPEKKSMFASLEGNELIDKKTMEAAAAKQEAVMEVAGLLIADHKKIAEAQAEIVKRNTQIEALTPWMSLEVAMNYPGTKKTAMLLGTMAAETTLEMIYGKLAEDHPEIEAVDISVISQDKDAVYLSVFCMKDQAADVENTLRTAGFSRPVVSTEQIPAKQKEELEEQIRQIEQTIADIRGEIISYAEDREELKIIGDYYRMRAEKYEVLGTLPQSRRTFIISGYAAKEAIPAIQKGIGDAYDCVIDVEELKEDEEPPVILKNNGFSESVEGVLESYGLPHKGEIDPTAIMSFFYVFFFGMMLSDAAYGAIIAIVCLIVLKKFPRMSADMRKSMKMFMYCGISTMVWGILFGGYFGDVVDVVSSTFFGKELTIKPLWFAPLNDPMRLLIYSMAFGLVHLFVGLGIKGYMLLKDGKVLDFFCDIVLWYIFLIGLILMLLPSEIFASIAQTKIVFPAALVTLSKALAIIGALGLLLMSGRSSKNPALRLALGAYDIYNITGWLSDVLSYSRLLALGLATGVIASVVNQMGSMLGKSVFGVILFIVVFIVGHAMNLAINLLGAYVHTNRLQFVEFFGKFYEGGGKPFEPFHAETKYVDIKEEKMVEETIKTIKETENEADEIIRKADATCTEILEKAAREAKEIKEQAVANAKKQAEADLLQAKEEGEVLKKQASEKTEQETEALKALAQGKEEEAVSAVIKALLMLNIVLHEPEIPANTGNIGRTCVATNTRLHLIEPLGFRLNEKNLKRAGMDYWEHLDVRTYIDYNDFLEKNPGAKIYMATTKAPKVYTEVNYEPDCYIMFGKESAGIPEEILVEHKEDCVRIPMVGDIRSLNLGNSVAIVLYEALRQNGFAGMNLEGHLHELHWMVDPDKKKVVVYDLEHNELPDIYGFEDQVPVKIFAGKCQIDFSEIYSYIEFLFEKEMVLPSPVSVQLDEDDRTMIQPDVVICCDREKILQSHVYGAPDMVIEILLPSTRKKIWAMKGSVSNPYPGMMKESVSAYRIYGDGTDHEGDIWKSFRGKKQGEYTLIMRSEEGDDPMTVEEMKKKKTELGFSCEQISDRSGVPLGTVQKIMDHIYDVIILGAGPAGLSAGLYAGRSRLDTLIIEKGQAGGQIINTDEIENYPGQIVEGETGVSLVRRMYEQTEQFGAEHVRDTITNAELSGDIKVLTGEKDTYQAKNIIIATGAYARPIGCKGEQEYKGRGISYCATCDANFFTDLEVYVAGGGDAAVEEALYLTKFARKVTIIHRRDELRAAKSIQEKAFANPKITFLWDSVVEEVGGDGLLQTMTVKNVKTGELTKIEADPKDGLFGLFGFIGMIPNTGVFADKVETDDKGYIKTDEDMHTNVPGVYAVGDVRVKSLRQVVTAVADGAIAAVQVERSMSDYMYIEKINGPEDVKKLTVDEMTVMAGEMREALLKRASIHGGHFGPNFGMVEATIALHYVFESPKDKIVYDVSHQTYPHKMLTGRKDAYLYEEHYDDVSGYSNPNESVHDHFTVGHTSTSVSLACGLAKARDLKGEEGNVIAVIGDGSLSGGEALEGLDYAVELDGNLIIIVNDNDMSIAENHGGLYGNLKLLRETNGQAECNLFKAMGLDYIYVDHGNDVGELIEAFQSVKDSKKPVVVHINTLKGKGYAPAEQNKEVWHYNGPFHIETGEPLYEMTEEDYSDISLNYLLEKMKKDPAVVAITSGTPTVMGFTEDKRKEAGKQFVDVGIAEETAVALASGIAANGGKPVYGVYSTFVQRTYDQIAQDLCINNSPATIVTFCGSVYGMNDVTHLGLYDIPMMANIPNLVYLAPTTKEEYLAMLDWSIEQNEYPVAIKLPGGSVISEGKEITKDFGDLNKYEVTQKGSKVAVIGLGTFYGLGKEVAEELKKVTGTDATVINPYYITGIDAELLEELKKDHDVVITLEDGILDGGFGEKIARFYGDSDMKVLNFGLKKEFLDRYDVAEVLKENHLTKEQIVEDIMKFIMTIKEVSETYDISADTLRYYERIGMIPEVTRTAGGIRDYQESDLGWVELVICMRKAGLPVEALIEYVKLYQEGDETFEARLQLLSEEREKLEEQKAQIESAINRLNHKISKYEEAVKTGVLNWEENSSCIMMRNPLSKKITGIEPSGIRKFFDLVSEMPDAISLGVGEPDFDTPWRIREEGIYTLEQGKTFYTSNAGLKDLKIEISKYLERKIHVEYDPDHEIMVTVGGSEGIDVALRAMLDQGDEVLIPQPSYVSYVPCTILADGNPVVIPLQQKNEFKLTAEELEAAITPKTKMLVMPFPNNPTGSIMTKEDLEPIAEVVKRHDLYVLSDEIYSELTYKTEHVSISSLPGMKERTLVINGFSKGFAMTGWRLGYICGPSVIIEQMLKIHQFAIMCAPTNSQYAAIEGLRHCEDEVQQMRNAYNQRRRYLVNEFAKMKLECFEPFGAFYIFPSIKEFGMTSEEFAMRFLEEEKVAVVPGSAFGESGEGFLRVSYAYSLEDLKEAIGRLSRFVERLRSQKMEELRKQILLYLEKHSRVDLGELAVLLGTDEVTVANEISAMERAKIICGYHTLIDWDKTGTEYVNALIEVKVTPQRDTGFDKTAERICNYPEVSAVYLISGDFDMMVLIEGKTLQEVSKFVSSKLSPIEDVTGTSTQFVLKKYKDHGTIMFGQKKPERMLITPMKLETQTEQLISETVTVYGLSPQIGVHALAQTANALAAQGTVFSVCPDITEDEETDTDIKNEDMQDTHETSASVSVQIAYPEYVFKSRIHKIEKLLKKACKKYNINLVAVQASANPAVQVIAVTVTGIAKAPKEEAWNRETARACRDIVFVGHAGMDGMLRITEEKEQELKTRFAPVFMKQIKSYGQQIFAPKEIEAAKAGGAFVVRQVADGGILAALWNLALELNQGLDLDMKKISILQETIEVCEHFRLNPYQMISTGSFLAVTDNGEVLADALNNQGITAAVIGHTTDNNDKILRNGEEMRYIDRPAPDEILKLYSGGMNDGRIKKADTPVSGEAMNFNNKRTRRIVSIVVLIVIIAMVATMIIPYLVMKKRTGEILELLDEKYGTEFICYLNYETPWQLLIATMLSAQCTDARVNIVTKDLFRKYPSVEAFADADLKELEQDIKPTGFYHNKAKNIIACMKDIQDKYNGEVPSELEDLLSLAGVGRKTANVIRGNIYHVPSVVVDTHVKRISNRLGLTKNQDPDKIEQDLMKELPEDHWILWNIHIITFGRTICSARSPKCEDCFLQKYCKEYKMMKILLAAVNAKYIHSNLAVYSLKAYAEDPAVEIGEYTINQQKDDILMDIYKRQPDILCLSCYIWNLDYIEEIVLEIGKLRPDMPIWLGGPEVSYDAKEVLRRLPCVKGVMKGEGEKTFKEICRIYRNEFEKRENVCGYQDKNVDNSWKKSESVDNQLKGVDGITFREEKEKIIDNPWRPIMDLSEVPFVYDHMEDFEHKIIYYETSRGCPFSCSYCLSSVDKRLRFRDIELVKKELQFFLDHKVPQVKFVDRTFNCKHDHSIAIWKYIMEHDNGITNFHFEIAADILNEEELELLEQMRPGLVQLEIGVQSTNPKTIKEIHRVMDFEKVSKIVRRIQNKGNVHEHLDLIAGLPYEDVESFAHSFDDVYALKPEQLQLGFLKVLKGSFMQEHQEEYGIVHKAHPPYEVLYTKWISYEDVLRLKGIEEMVEVYYNSRQFTNTMEELEKEYDSAFTMYDRLASYYEDNGYNAVQHKRSARYEILLNYIRLHHKEKEDLFREVLTYDYYLRENAKSRPEFAGDYLVEKNVARAFYEKEEETHMYLPDYGKYDRNQMRKMTHLEYFKLADTYILFDYQNRNPLNQEARVCKVEIDKVRIKMNATVMAIILVLIVVATVVTKKVPFNFVLFIVPIICSLLLGFSLQETSDFVLEQFSSIMKSAGFMLLFAFLYFQMLTEAGVFDTIVSAVTNKLGDKMNVIVIMILTSVIAAFAILTGNFTPAYLITFPILVPLYKKYDFDREAAFIIAQTAMSAMCFIPWGIGMAYTASSAGLSANELSKASVPWALCFIPAIVLQWVYFGIKHKKRVGTFGVVVENVEEETKEVEENPYRRPKLFWINFILFIVFMVGLGVFSLPPYLVFMAATVVTAMINYPKNFGEIFGKVGPMYLNIIVMLLAISVYQAVFNNTGMVGAVSDGLIKICPKFMLEYIHIILLLLCVIIIYFIPFQIFNAMYPVFISIGAGFGIPAVTIIAPFVCNLSLATSSTPTNSSTYLGCALTETDVQHFCKKAVPVQTVTNAIVILLALIFGIVMTSEEIKNMSFEDFRTQIEGMEEVQKLTADGTERYGIYKHDVCYVNRDGIERTLQMIVPETNAKAPKIYPAILYVQGSAWRKQDNYKRLGAMADLARRGFVTAILQYRESDLATFPAPVEDAKTGVRFLRKHAEEYRIDPSQVFIMGDSSGGNTAFIAGVTADQELMDTDVYGEYSCKVNAIVDFYGVTCVQIKEDFPTTLNQGEPDSPEGMLIGKKNVYEYPELSNAVTCMNYVKKETEIPPVLMMHGLADDLVAPEQSIRLYKKLREEDKEVEFYLVENAKHGDPAFWTEKNMDIVEKFLKAHMNMNEKTVGMLAKFTGVSVHTIKYYEKIGLLSSTRREHSNYRSYDIRACTDIYECMKYKNLGFALKEVGNLIKEADSEAIDNLLKKRLEEIDASLSELQELKKRVTDYLAETEEIEKKQGNWYIEEMPDFWIRFQTNNLEYGKNAQLESDGINFMDYAPESKSVLKISRESLNGTENQFSWGQAVRAEYIEDIEKNENVWSRQKGYTRIKGGRAFVLYLKITGPYASEGVLQKKIRKIYRKFQQDAKIPGDAYCVRIKITHDEEGNDWNYLKIYILLKPESMQSTDEKYMKEAIKQAKKAYAIGEVPIGCVIVYQDKIIGRGYNRRTIDNNTLAHAELIAIKKASKKMNDWRLEDCTMYVTLEPCQMCSGAIVQSRMTRVVVGCMNPKAGCAGSILNLLDIPEFNHQVELTTGVMEEECSQMMKSFFKELREARKKKKQLEKEQTGEIMRRFIRYLYEYEQEKKMRNVGFVKVEQDVDQCVIHVHGKGFRMEENAQGLRAYLFWNTEDKCIGIPQGVTEVPGPAVNWQLCYTPEDVCKKENYDLVNGIILKDVNGHWYAAVWNDDVVNVCRMEMWKMEEDYVQGEEPECKKGLAQGEEPECKKGLAQDEEPECKKGLAQDEEPECKKETVQDEESESGKLEDDLEKEACLGGKVRKIQRKDMVCLPRCEWRHANNSFLIHGYYNYHHLILTVRDDRLKLGVPGVYHPQEEKAAESFGFPEFIPAEELDLKLTDEEKNDREKFGYWCRDIRGSHDCVEPQKRMEWTRLLSTKRQRQNRYKSQKYGDADLRSEFEKDYHRIIGSASFRRLQDKTQVFPLDKSDFIRTRLTHSMEVSSLAKSLGQNIGESILVHKKDSSFTVQMKEDICNILQCAGLIHDIGNPPFGHYGEAAIREWFERNLPLLTYHGTSLEELLEPQMREDFYHFEGNAQALRLVSKLHFLVDENGMNLTYALLNTIIKYPVASTKIHPESGDIREKKMGYYYADRELFEDIVSETGAGNHRHPLTFILEAADDIAYKTADIEDAFVKRFLTYHSLRDELRKLQNREKKYADPEEKDQNWFCPADKLVELYDRAKKNGVDDPGDYAVKNWIVKAQGFLIGCATSGFTSHYEEIMEGTYKKDLFAGTLAEGLVKLLGEIACKCVFKTETIYRMEVKEAVMLDNLLDRFVGAAIKYDDPTQKLNSIEERLISFISNNYKKAYRYHAEEKSEVYRLYLRLLLVTDYICGMTDSYAKRLYQELNAIMAMLELTFGEQVKIILSRKGMTIKELAEKIEKQTGKKMSRQNLTQRLGRDNFQEQDMRMIAKILECPFYLDILEEHEEHEEKPSKAQKITEPEKKKTPAKAEERDITIGELVDIHKELDAIEKKKKKKSKKVVEPDPEYVQETIFDFVREKEAIAEPATEIEEQEEEIQEPVEETGSSEAVTPEAEESVTVSEEEPAASVEEYAEKPVYEDEPVYESESEYAEEPVYESESEYAEEPVYEAEPEYAEEPVYEAEPEYAEEPAYEAEPEYAEESAYEAEPEYAEEPVYEAEPEYAEEPAYESELEYAEEPAYESEPKYTEESAHESEPEVEEPEEPEKPEPKKVEPEKKAHGWRALFGIRKKHEEESAHEEPAKEEKPEIQYHEFDYSGDGESEKLAEEFMPEEPEQEETYAAADETSGYENNGYQSRYAQENEEDLFTSDEEDLSKGELNPYTGHEYESNSVRMHPKRIGYVQVYDRGKHQWTDMTEWAFLGYQERKKALLGKDYEPPIYLDMNMKQLMTKWADNINEKNVLGEYPRPLMRRKSYVNLNGIWKYAIRETKGFPKKMDGDILVPFSPEAVLSGVNRQLKPEEYLWYKRRLPDEVKPEKGSRWILHFGAVDQCAVVYINGKKQGKHVGGYLPFSYDITEALKEEKNLLTVKVRDYSETCYYSRGKQKLKNGGMFYTAQSGIWQTVWIEKVPECYIGHLKITPLYDQSSIMIQMEEEHGIKDIDYEVTITARKMWPVKASGKTGKPCVIMIPHMRSWSPEDPFLYDLHVRMGEDSVESYFAMRKVEVKNDKEGIPRIFLNNEPYFEKGVLDQGYWPDGLYTPPCDEAMIYDIQKMKDLGFNMIRKHIKIEPQRWYYHCDRIGMLVWQDMVNGGRDYKSWYVTYMATAMEGMHIRAKDTRIHLMGRQDPAGQRQFEKEMKETVRLLYNHPSIVTWVIFNEGWGQFQTKKMTDIVRAEDPYRLTDSASGWFDQGCGDIRSIHDYFFPLHVTPEKRVTALTEFGGYSLQIPKHSMYEKKVYGYKKFKRKRELTAGYEKLIKKLIIPNIRRGLSATVYTQLSDIEEEVNGIISYDRKIVKMDEKTVKKLNEKLHFMVSVWAADITPLLIEETYQAYYDKVPEWRKDKADKLKNVDDKARSVGAWILWEKMKKALRLPESAVFNLSHSGKYVLCACSDRGDVQTGCDVEMKGKLRMPVAERYFCREECEIIRNGKDEKEQAEWFYRFWVLKESFMKATRRGMGLDMRTYEFAWGQDGIPYLKKQPEEYPEKYLCREYELEQGDARVAVITTDNEIEGRLHEVRLAMIIVLKPRTTKDDVSRVENMVKKRGLNTHVVQGEEMTVIGCIGDTAKVDSKLFEIDSAVDKVMHVQEPYKLANRAFHPEDSIIDVSGVKVGGDNLAMIAGPCSVESYEQVLEIAQAAKASGANLLRGGAFKPRTSPYSFQGLGLEGLDILTSIKEATGLPIVTELMSDKYLDIFNEKVDLIQIGARNMQNFDLLKELGQLDRPILLKRGLNATYEEWIMSAEYIMASGNENVILCERGIRTFESYTRNTLDLQSIPVLRKLTHLPIIVDPSHAGGKWWLVDSMAMAAVAAGADGLMIEVHNDPESALCDGAQSLKPKKYDELIKKVSQIAGVVGKTIMKLTVNLGKDSYPIYIENNILSQAGDYIRKIYHGKRIMIISDDNVFPLYGDRLIHTLDSTYECHHLVLPHGESTKDFQTLPTVYKAMLEAKISRSDLVIALGGGVIGDLAGFAASSYLRGVRLVQIPTSLLAQVDSSVGGKVAVDLPEGKNLVGAFYQPSLVLIDPLVLNTLKERFINDGMGEVIKYGCIKDADLFSTLESHSSFEDLKEELPAIITRCVDIKRMVVENDQFDTGERMLLNFGHTLAHTIEQHFHYQRESHGEAVAIGMYQITRIAEEKGLTPKGTAERIQKVLKTYGLPFECGLTLGTLTEAIALDKKNLNGNLNVILLHEIGDSYIEATDIQFFAETARLVMGKLEGKIAIVTGSGKGIGRDAALAIAAEGATVVTVARTQSDLDETVKMIEDAGGTAISLSRDLTDGEQVADMVKTVVDKYGRIDILVNNAGGYPKEIYKNIEHQAIKIWEWSEEQWDQIIKTNLRIPFLVTKNVVPVMIKQGKGDIVNVSSRMGRIASQMGAYAVAKGGIVTMTKTTAIQTKEYGIKCNAVSPGIVDTPGQRVYNHSVGQDGCPMGSSKDVAKAIIYLLADSPAVMTGQSIDLFTTVMLEELKKEVYEANMLLPKYDLVTFTWGNVSGIDREKGLFVIKPSGVDYDKLTPEDMVVVDLQGNKVEGDLNPSSDTATHVELYNRFPNIGGVVHTHSPWATSWAQAGRGIPCYGTTHADYLYGTVPCVRNLTKEEIDEAYEKNTGVLIADRFDEDDLDYVATPAVLCKNHGPFTWGKDAHEAVHNAVVLEEVAKMAARCEMINPDVKPAPQELQDKHYYRKHGANAYYGQPGKMSNVKEIIESGKAYLGIEFGSTRIKAVLIDEEHNPIASGSHTWENRYENGLWTYSLDDIWAGLQDSYRDMAENVQKEYGVTIKKLGAIGFSAMMHGYMAFDKEGKLLAPFQTWRNSNTGKASEVLVDLFQYNIPLRWSIAHLYQCILDKEDHVKDIAFTTTLAGYIHWQMTGEKVLGVGDASGMFPIDMNTKDYDEEMIQKFDKLIEGENYPWKIKEILPKVLVAGDAAGILTEEGAKKLDPTGNLEAGIPLCPPEGDAGTGMVATNSVAQRTSNISAGTSFFSMVVLEKPLKDLHTEIDMVTTPDGSLVAMVHSNNGTTDLNAWVNLFKEFADSIGADVDMNQMYGTLYNKALEGDADCGGILSYGNYAGEPITNVEKGRPMVVRTPETKFNLANFMRSHLYTALGVIKVGMDILTKDEGVEIDTVLGHGGLFKTKGVGQKILADAINTPVVVMETAGEGGPWGMAILAEYMVKREEGEKLEDYLKNKVFGSDAGSRIDPDPEGVAGYEAFMETYKKGLDVERRACADLMLKTKNYQFWFCTGSQDLYGDECLAHVAEHSKIIVDALNKSGNLPYEVVWKPTMITNEVIRKTFNEANTDENCAGVITWMHTFSPAKSWILGLQEYRKPLLHLHTQFNREIPYDTIDMDFMNENQAAHGDREYGHIFSRLNMERKVVAGYWEDEDVQKQIGSWMRTAVGVVESSHVRVMRVADNMRNVAVTEGDKVEAQIKFGWEVDAYPVNEVVEAVNAVSQADIDTLVEEYYDKYDILLEGRDEKEFREHVAVQAGIELGFERFLDENNYQAVVTHFGDLGGLKQLPGLAMQRLMEKGYGFGAEGDWKTAAMVRVMKIMTQGMKDAKGTSFMEDYTYNLVSGKEGVLEAHMLEVCPTIADGKISIKEQPLSMGNREDPARLVFTSKTGPAIATSLIDLGDRFRLIINDVDCKKTEKPMPKLPVATAFWTPQPNLKVGTEAWILAGGAHHTAFSYDLTAEQMGDWAACMGIEAVYIDKDTTIRQFKNELLWNSVAYRKMSETGNGRKNWTRVVAAVGLVFLAVAIALLIGLLFGIVQGFLVSYLEIQPFIVSLAGMFFGRGMTSIISTDMISIKNKTFLAWANYKIYLPIGSYSRRGKFIPAYIYPTVIIAILIFIVVLDGLLAGCGGFLFCLNSCSGFVEQAKGLEMDAISASVIGGTLLSGGVGTPFGTVFGVLIKGTISSLITTQGTLSSWWVRIALSALLCFFIVLRALSCMTSVTCRCLFVFFLKMSTFSLKIISTDKVFYDGKCEYLVIPTIDGEKGILAHHENMVIAVEIGELRFRKPDGEWVTAVVSKGFAEIVNNRASVLVNTAERPEDIDVKRAEEAKERAEEQLRQKQSIQEYYLSQASMARAMTRLKASRNRRGDIMTKGRIVQVMGPVVDVEFNSREELPFIKDALEVDNGGKRCVMEVAQHVGNNIARCIMLASSEGLQKGMEVTATGAGIKVPVGEKTLGRLFNVLGETIDNGEPIKDSEEWVIHRKAPSFEEQSPAVEVLETGIKVIDLLTPYAKGGKIGLFGGAGVGKTVLIQELIHNIATEHGGYSIFTGVGERSREGNDLWTEMRESGVLDKTALVFGQMNEPPGSRMRVAETGLTMAEYFRDVEHQNVLLFIDNIFRFVQAGSEVSALLGRMPSAVGYQPTLANEMGALQERIASTKNGSVTSVQAVYVPADDLTDPAPATTFSHLDATTVLSRKIVEQGIYPAVDPLDSTSRILEPAVVGEEHYQVARKVQEILQKYKELQDIIAILGMEELSEEDKMTVARARKIQKFLSQPFSVAETFTGVPGKYVPLKETVRGFKAIIDGEMDEYPENAFFNVGTIEDVIAKAKAEGVAMANAKEIKERMASIEETRKITNAMYLISSSKMKQAKKKLADTEPFFYAMQAEIARILRHVPDMHSQFFDGRESIPAEERKIGYIVVTADKGLAGAYNHNVIKATEELLKKPGKHKLFVLGEAGRQYFAKREGIEMDTQFRYTVQNPTLHRSRVISSEMVEQFRNGDLDEIHIIYTRMINAMTAETEEQKLLPMKKTTFLPEDMPALVGTGLYQEDMVFWPSTHSVMANIVPNYINGIVYGCLVEAYCSEHNARMQAMQNATDSATDMLNELNITYNRVRQADITQELTEIIGGANAQKRKMSAISSDEIISILKEEIKNYDVISRDQEVGTVISVGDGIASVYGIDHAMYGEIVTLETGLKGMVQDIKENEISCILFGDDSEIKQGTKVCRTGKKAGIPVGEGYIGRIVDALGAPIDGKGEIKADGYRPVENEAPGIVDRKSVSVPLETGILSIDSMFPIGRGQRELIIGDRQTGKTSIATDTIINQKGKDVICIYVAIGQKASTVARLVNDLKAHDALDYTTVFCSTASECAPLQYIVPYSATALAEYFMYQGKDVLIVYDDLSKHAVAYRAISLLLGRSPGREAYPGDVFYLHSRLLERSSRLSEEAGGGSITALPIIETQAGDVSAYIPTNVISITDGQIFLESDLFNAGMRPAVNVGLSVSRVGGAAQTKAMKKASGSVRIDLAQAREMESFTQFSSDLDDATKNQLKYGSCLTELLKQPLGRPLSLHEQVITLCVATNKLMLDIDTKKIKEFQMDMLAFFDREHKEIGKAIDEKKVLDDELKEQILAAAKEFKERRMTAKNRKEAEPVFCQVAALRYAKVLSELGISEETVREAGSIFETSQELKAALVNPVITKETKHNIIDKVFSEEMRTFLKVVCDHEKMTIAEQIFAAYEELQNQAAGVKTVYLRYTALPSEEQKKQMGDFIKKKYGAGDIKWVMAEDKALIGGFILQVDGKEYDYSVQGRLNRLERKLTNMLRIDFNLVLTIINLIVLYLILRKFLFRPVMDIMEKREKMIADGIGHANEEQDKAHALKKQYEDALNGAKEESTKMIEQAKLDAKQEYNQILNEANEKADKVMKTARESLNQEREQAFDDMKAQVAGLAMDAAKKILLENADNISGVNAYDQFLKDAGDSHDSEEMSGTIIAIGAGIAVLTGIGAGVGIGIATSKAVDAIARQPEADGKIRTSLILGCALAEATAIYGFIIALLIVLLLKMKEGDSTEKLVESLVKELNCETVFTIPVFGGIAVDEGVVVTWIIMAVLTILSIVFVRNLSIEKPGKVQLMLESVIGWAQDFFEGIIGKENKGYIPYLMTVALYLAISNVIGLLGFKPPTKDMNVTIALAVMSMFVIEWSGIHRNGLVHWCKHFAKPVPIVAPIMILEIVIRPLSLCMRLFGNMLGGFVVMELIKEVVPLIVPIPFSFYFDIFDGLLQAYVFVFLTALFMTEEMEMCIFLVKKRTKIGTTILTWKFDEKNGKIKINKSKNTQKNNKKLSKMTIRQNDMLTCIYVVEKIDGDYAELRRVDALKHDPEETKTVARALLPGDIMEGNKLLYENLQYRIIVDMNEVDFSKVGLKMKQLRSERGITQEQVAKDLNCTVPFVSNVENNRAKLNLRVLLYYSKLCNVSVDTILDAGRDIPPLDEKEHQLNDEMLNVFRGFSVTAKEKIIKMLRIWQEKMNYGNIKECDIADGPGVRVSLFVSGCRHHCKGCFNEETWDFGFGQHYTEETEAEILRLLGAGFVQGFTLLGGEPFEPENQVELVKLLKKIRETYPQKDIWCYSGYLFDRDMVPGGCVHTDVTEEMLSYIDVLIDGEFKEELKDVTLVFRGSQNQRIIDVQESRNQGTVVLKDFMTKDNEKYQAYVQILNEELIPAMGCTEPIALAYAAAKAREVLGCLPDRVCIGASGSIIKNVKSVIVPNTNHLKGIPAAAAAGIVAGNAEKELEVISGVTEEETKEIAEFLEHTEITVEHINNGCVFDIIVEVFHGEDKAKVRIANYHTNIVRIEKNGEILLNVPVAGESEEGLTDRSLLDMKSIWDFANTVDIEDIREVIGRQIEYNSAIADEGLKGNYGANIGSVLLDTYGNDVRTRAKARAAAGSDARMNGCELPVVINAGSGNQGMTCSLPVLEYADELQSGEEKTYRALVLSNLVAIHQKTGIGRLSAYCGAVSAGAAAGAGIAYLCGGGYEEVIHTVVNALAIVSGMVCDGAKASCAAKIASSVDAGILGYNMYLRGQQFYAGDGIVTKGVEATIQNIGRLGKDGMKETNEEIIKMMISDMNAEIKTNVIKRNGEEVAFDLEKIINAIKGANKDVDKLHRMNEYQIMAVADNVAKKIEESTHAVNVEDIQDMVETGIMELRGYEVAQKYVRYRYKRELMRKTNTTDNGILALLDHMNEEVNQENSNKNPVINSTQRDYMAGEVSKDLSKRVLLPEEVVRAHEAGIIHFHDSDYFAQKEHNCDLINLQDMLQNGTVISETMIEKPHSFFTACNVTTQIVAQVASNQYGGQSFTLAHLAPFVDISRKKIRRNVIAEREECGEALDETIINKVTERRLREEVKSGIQTIQYQLITLMTCNGQAPFVTMFMYLDEVEEGRTRDDLAMIIEEVMIQRMQGVKNEKGVWITPAFPKLIYVLDEDNITEDSKYWHLTELAAKCTAKRMVPDYISAKIMKEMKNGEVYPCMGCRSFLTVEDSQRNPDGSHKFYGRFNQGVVTINLVDVACSSEGDMEKFWKILDERLELCHRALRCRHERLLGTVSDVAPILWQNGALARLKKGETIDKLLFNGYSTISLGYAGLYEMCVRMLGKSHTDPAARPFAMQVMQKLNDKCEEWKKAENISYSVYGTPMESTTYKFAKCLQKRFGIIKGVTDKNYITNSYHVHVSEKIDAFKKLKFEADFQKLSPGGAISYIEVPNMQNNIPAVLSVMQYIYNNIMYAELNTKSDYCECCGYDGEIQIKEDENGKLIWECPNCGNQDQDKLFVARRTCGYIGTQFWNQGRTQEIKDRVLHLMKKYVCEPCGYEYDPAVGDPDNGIAPGTAFEDIPDDWVCPICGLGKEVFVAEDMKLQQLQIFQNLTEEELEKSLVCSQAVVKKYPKDTYIFRQGDVPLKLYFILEGMVELGSINLNGKITRSSYVTVGEEFGEVEMFLRQSAYSGYAKAKNEVSVLEVSQNFFGGRCERNCVHHSKVVFNMLQLFAEKAEKCNRQIEVLTSGNLRQRVAAYLLENCDPDYRVRLHMNREDLAVYLNTTRPSLSRMLLTLQDEGIIRLVGRKVIEITDYERLQSEEMNITFDDNLITGNKTIDSQHQELIDRIRQFVAACESGDSKIKAIKMLDYLDEYTNFHFQEEEELQKKVSYPEFSGHHAKHEEFKTSIQELYDYLNENEGPDDQFIEQVKRNVVDWLFQHIKTFDRSVAEYIHLKDNSNRLMNQKLTKYAWLLPFFSGICWGAAGIFVRTLEHDGLDNFSIISFRMLLAALITGIWILFYNRHLFYVHRRDFWLFIGSGMIGMTALSVFYNISVTKGSLALSAVLLAMSPVFVLFLAAIFFHEPITRHKLTCVTLALIGCVLVSGVLESNGLSWSITGILCGILASFFYAVYGIISKKVTQKGYHFLTITFYGTLFSGMTMLPFSNIHSLSSMIVSGQRTTFFILIIHALVSSVLPYALYSLSMRYMEAGKASILASSEPAAAMLFGAVLYAETPGILSICGLCFTITAVILLNYERNMLAQGYVCETSPLGNVYYLPDGVTVTGDISINYMEYPWITCFEVSGLAVSRSMIRNLSQKQLDVMKILWDAGTPLVASDIVKAESSMNINTVQASLRVLLKENLIEIADIVYSGTVLSRSYRPLISRDVYFNAEYKNIIGNSSTSAMIATFIEQEEDISELERIEELIRKRMKELEEAQMNQIFYDAVGNNPIIAAVKNMKDIEVSCTIEEIQVIFILFGDVCSIDRIVKRVKDAGKVAMVHVDLISGLSPKEVSVEYLKEHTEADGIISTKPSLIKKAKELGMYTILRYFLLDSMAFENIRQQQHIVRPDFIEVLPGVMPRVIKRICSSIKTPIIAGGLITDKEDVMAALSAGAIAVSSTNHQVWKMMAKYVMALDAGTTSNRCILFNEKGEMCSVAQREFTQYFPKPGWVEHDADEIWASMLGVAVEAMNMINAEAEDIAAIGITNQRETTIVWDKETGEPVHHAIVWQCRRTSEYCDSLKEKGLTDKFREKTGLVIDAYFSGTKVKWILDNVPGARERAERGELLFGTVETWLIWKLTKGAAHVTDYSNASRTMLFNINTLEWDDEILKELDIPKCMLPEPKPSSCIYGEADPSYLGGPIPISGAAGDQQSALFGQTCFNAGEAKNTYGTGCFLLMNTGEKPVFSKNGLVTTIAWGLDGKVNYALEGSIFVAGAAIQWLRDELRIIDSAPDSEYMAKKVKDTNGCYVVPAFTGLGAPHWDQYARGTIVGITRGVNKYHIIRATLESLAYQVNDVLVAMKADSGIDLAALKVDGGASANDFLMQTQANIINAPVNRPQCVETTAMGAAYLAGLAVGYWESKEDVIKNWAIDKTFEPKIDEEQRSKMIKGWNKAVKYAYGWAKEDMLPYIAEFLGTMILIILGDGVVANVNLNKSGMKGGGTVQITIAWGLAVMLPACIFGAASGASFNPALTLALAVDGSFAWSMVPGYIVAQFAGAFVGAAVVYLLFKGQFDATEDQATKLGVFCTAPSIPNLGLNIFSEAVGTFILVFAIKGMANVPELTDGLGKFIVFGIIVSIGMSLGGLTGYAINPARDLGPRLAHAVLPIKGKGSSNWGYGVVTLVGPVIGAVAAVLLYGAIPWMYDVMIIGSGVSGSAAARELSRYKAKICVLEKEEDVCCGTSKANSGIVHAGYDAKEGSLMAKLNVRGNAMMEQLSKDLDFPFKRIGSLVICLREEDMDKLQALYDRGVANGVSGLQILNREEVLEMEPNIADNVYAALYAPTAGIVCPFGLNIAMAENACENGVEFKFDTEVKELKKTEDIWEVHTNQGIFKTKYVVNAAGVYADKFHNMVSEKKIHITPRRGDYCLLDKTAGGHVKRTIFALPNEFGKGILVSPTAHGNLLLGPTAIDIEEKEGTNTTREGLDQVLTKAGQNVKNIPMRQVITSFAGLRAHEDGHEFIIEELEDAKGFIDCAGIESPGLTSSPAIGEMVAGILKEKLHLEEKENFIATRKGILDPNTLSKEERVKLIKEKPAYGNIICRCEMITEGEIIDAIHRPLGAKSLDGVKRRTRAGMGRCQAGFCSPRTMEILARELEIPMSEITKSGGKSKIIVGVNKEDIMKTYDIVIIGGGPAGLAAAVSARENGIQDILILERDKELGGILNQCIHNGFGLHTFKEELTGPEYAGRFIKQVKDLGIEYKLHTMVMDISSDKIVTAMNREEGLFEIQAGAVILAMGCRERSRGALNIPGYRPAGIYSAGTAQRLVNMEGYMPGREVVILGSGDIGLIMARRMTLEGAKVKVVAELMPYSGGLKRNIVQCLDDYDIPLKLSHTVVDIKGKERVEGITLAEVDSKGKPIPGTEEEYTCDTLLLSCGLIPENEISRGMGVDMNPVTSGPKVNESLETNIEGVFACGNVLHVHDLVDFVSEEAKTAGRNAAEYVKNLQSDTDGGEKSSKEDAADITLNPVEGVRYTVPSTINPAHMDENLTVRFRVGGVYKNCYVSAYFDDERVIHKKRPVVAPGEMEQIKLTKEQLMKYPDLKTITVKIEEAMETVTTRELTCIGCPMGCPLTVTMEAGEVISVTGNTCKRGDIYARKEVTNPTRIVTSTVRVTGGDADMVSVKTKEDIPKGKIFECVKALKTVEVPAPVHIGDVLLEDVAGTGVDIVATKNVGTKSMEPYYYSKMNKVQQAAYHAIRQGLLEISDSIQIPGMEAEELYNVFFRLRLDHPEIFWATGYKYKYYSDSPNFIFIPEYLFDKNKIKEHQKALKSRVEKLIRPVKDKSEWEKEKYVHDFICENVHYDKLKKPYSHEIIGPLGQGVGVCEGIAKSVKVLCDALGIWCMIAVCGNNPEKGIKYRHTWNIVKIGGKYYHLDATFDNTLGNGEKMSDRQASKEIRYDYFNLNDKSIFRDHEPLIAPAPKCEDGEHFYYKEKKLSFTKTEDVYKRALQTAKKGRVFTFHWRGGYLTKAVLDELLDLIQKAGKEKQKNARISLNWPQAVIRFDYVEDHGEAEPEVVVEEANEGEKEMDAFVMLQELLEQEQFELIFPEKNGQNIRLVYLMNDAVESFLVFHNARMTGEYRADYKGKISASMSFEDSEYILVVRQGESVVTIFFEDLLTDVHLYDYGEIGHFWVKEYEYLRQLEYRLAIMRDKYDYLGEEYCTSEEQKLAMLVDFPPLNYCCYPAVPEQYIVPRIEPWVPTEEAIAVMEELVVEADDKGLQKILKIYRKHPNPHIAKKIAAMLHRNAHAEVVDLLNERLKKAVSGYRKRSYGEEMDAQCLKLLLKVKNRQQKLQKEGKESVVLREEPFEIAKDSIGYQIHLMIWEKGILNRKVRIESYSLEKEMDERISRVLEKMKEKGIDQLLVSDPLSIRFLTGIMVNPGERLYALLLRTSGKHTLFLNYLYYVSNTGFEEVWFSDMDDQIGVLMEHIDTKSTLGIDKTWPARFLIPLQERCPEMKTVWGSDCVDGVRAVKNAEEIEIMKHASVINDTVMERVANFIKEGMTEKEVADFIDAEYLKEGASGVSFDTIVCFGPNAADQHHTPSETRTLKAGECVLIDMGCVWKGYCSDMTRTFYCKSVDDEQAAIHDLVRTAVEKAEAVIKPGMRFCDIDAQARDLIDEAGYSEYWRIRLGHFIGQEDHEYGDVSPINKNVAEPGMIFSIEPGIYIEGKYGVRVEDLVLVTEDGHELLNAVDKKYRIVGMKEKKKLSLAAQIFIALVLAVVAGLLMQKYANFAETYIKPFGTIFLNLLKFIVVPIVLFSIMCGIISMKDIKKVGSIGAKTVVYYMCTTAFAITFGLIGANMFKGAFPKIATTDLSYKADQTISLMDTIVNIFPSNFVSPMVEANMLQVIVTALILGFGIILLGEGERNTRLVTACNDLNDVFMKCMEMILKLSPIGVFCLLSPVIASNGPAIIGSLAMVLLAAYVCYIIHAVVVYSFAVKTMGGMSPLKFFKGMLPAIMFAFSSSSSVGTLPINMECVENMGASKEVSSFVLPLGATINMDGTAIYQGVCAIFIASCYGIHLTLPQMLTMILTATLASIGTAGVPGAGMVMLAMVLASVGLPVDGIALVAGVDRIFDMGRTVVNITGDASCSIIVSNMERKKDAKREIANGLMRILIYGAGVIGSFYASRFAKAGLDVTVLARGQRLKELQGHGLWYRGKTRTHKVEVKTISELKPNDRYQFIFLTVRENQVEEALEDISRNESPNVVTMVNTIKPYGRWEKICGKGRILPAFPGAGGCIEGGILDAQLLPRAIQPTTFGEIGGRKSSREEALAYIFRKSHIPYQIVPEMHHWQISHLGVIIPLADAYYQSRHPEKICANEKLMTLTAYRMKKNLKWIAQKGMLCPAKLYMIKDMPTGMLAGVLSRVYQSEFGNRFLYRHAMHAPEEFQRLHQEFYNYMKTHTKESNKTMIRPIMKDIFFLNQRSEPATEADKQVAVDLLDTLKAHEEGCVGMAANMIGVKKCIIAVNMGFMNVAMFNPKIVKRSGKYETEEGCLSLTGVRKCTRYQEIEVEYQDMNFKKQRQKYTGWTAQIIQHEVDHCHGIVIMAKILCSPSKYVQGAGEMKKLGEYAQKYGKKALVLITESGYKRIGDVVNTGFEGYEITPVYEYFNRECSKNEINRLVDIMNEKGCDVVIGIGGGKILDTAKAVAYYKEAPVLICPTIASTDAPCSALSVIYTDDGVFEEYLFLPANPNMVLMDTEIIAKSPVRLTVSGMGDALATYFEARACQASGATTCAGGQVTQAAIALAKLCFDTLMAEGVKVKLALEAGACTPAVEKVIEANTLLSGIGFESGGLAGAHAIHNGFTVLDECHHMYHGEKVAFGTITQLVLENIPAEELEDIIDWCIELGLPVTLKELGITEVTDEKLMAVATAACAENDTLHNMPFEVTPETVCAAIKAADAYGKYFLGEMIKSYVIDTNILIQAPYACQCFEENRVILPLVVLEELDGLKKAEGEKGANARRAIRFLEKLRLKGDLLKGVQMENGGILRVEANCVNVELPESLPEDKPDNRILKVCKGIREEEKPVVLVTKDLVLRLKAQILGIEAQDFSTEQVIEEEGQYSGRQICYVAEDKFKEFKKKGVHLKELYLSDEDGNKIQPELTENEFIILKADQSVKKTHLGRVEGKKVVSLEFRKSQPYGIKPRNAGQYFLQEALMKSAEKAPLVIVKGMAGTAKTFYSLAVGLEKVLNNPTGEYRRILICRPNAQFDQDIGFLPGDEQEKISPLMRPIVDNLEQLIDSDEEERYQDEQELQGKIEEIFARGLIQTEAMNFIRGRSFVKTYLIIDEAQNMTPNQVKGIITRAGKGTKIILLGDPNQIDRPFLDERTNGLSYASEYMKGSPLCYQITMSAEECERSELAMDAIHRLMSKVTYKAIKNMPEVNAYIEQGNRVLGALGFTEHSRGHAVKVAETAGNILEKLGYNQHTIELARIAGYMHDMGNCVNRVDHAHSSAIMAFQILRDLKAPDEDIAVIVSAIGQHDEATGMAVDAVSAALILADKTDVRRNRVRNTIKESFDKHDRVNYAAVASSLHVNVEKQVILLEIELDEGICSILDYFEIFLQRMLMCKRAAEMLGMKFKMKANGNKICMDQTYMKEQPILKLIVSMALPMVISMMVSSLYNIVDSFFIARISEDAMTALSLVYPVQNLINAVMIGFGIGINAVISFYLGAQDKKMADRAATQGMLLGTIHGVGFMILGIAVMRPFLQMFTGNAQIVDYGVRYSRIAFLFATALSWQLVFEKTFQAVGRMVESMTCMMSGAIINIILDPVLIFGLGPFPKMGIEGAALATGIGQAAGAVLYLIFYIVNPLPVKYRKKYLKADLKLWKKLYVIGIPASLNLALPSLLISVLNVILTGYGEVYVFVLGVYYKLQTFLYLPANGIVQGMRPLLGYNYGAGEHKRVHKIFQDGLILVLVMMAAGMAICLAVPGQLMGLFTANPITMKAGSVALRVSSLGFLASSVSVICSGALEGLGKGVHSLIISLCRYVVVIIPVAFIVSRFMGAVGVWHAFWITEVVTAVIAYVVYRKGVKGMNKEYNKPIDTDGVIDIYPNVKRRKYREENKKKNDSDCKVSPEQEMLKVAIYGKGGIGKSTVTSNLAAAFATMGKKVIQIGCDPKADSTMNLLGGEPLRPVMNYMREEDEEPEKLEDIAREGFGNVLCIETGGPTPGLGCAGRGIIATFQLLEDLKLFETYKPDVVLYDVLGDVVCGGFAAPIREDYAEKVLIVTSGEKMALYAADNISKAVKNFEDRSYARVFGIVLNHRNVENETEKVETFAKEHGFDIVGEIPRSDEINRCEDQGKTVIEGNPESDISKCFYDLAEILWKDEEQVMRGTAYYCTVEELQKRGRDDIPEQFRSNTHLIYSSPATLAFNSPGAEGFGVKRAGLAIPDSIMLIVAPGCCGRNTSMISSMPQYEDRFFYLTMDETDIVTGRHLKKVPKAVQEICDSLAKKPSVVMICITCVDALLGTDMERICRKSEEKTGLPVRPCYMYALTREGRKPPMVHVRQSLYSLLEPKKKKGNVVNLLGFFSPLMDDCELYGMLEKAGVKTVHEISRCKNYEEYQTMAEANFNLVLHPEARFAAEDFHEKLQIPFIELRRLYQIDKITKQYQALGKVLGIPFEDKEAERTALDAVERLKVAKPDAIFAIGECMNGDPFELALALVKYGFQVAEIYGTLTAENFVYLKHLSELSPQTKVFSNMEPTMIYYDHKESGVTTTIGKDACYYHPDAENVMWNEEVQPYGYAGVKHLCERLLEVMKGLRKYLTPFAPDQSGAVSVLYELGGMLVICDAGGCTGNVCGFDEPRWFETRSAVFSAGLRDMDAILGRDDRLVAKLADAAEKLDVTFAAVIGTPVPAVIGTDYRALERMLSKKTDLSVLTVNTDGMELYDKGEEKAYLALFEKFSDKNEESEGMNDKDRPRIGIIGMTPQDVSDLKAADKIRKVYADQGMRAICYGMGDGLDEVRNASLAAKNVVVSPAALKAAQYLQKKFGTPYEIAYPLASELVPEVNYQGKKILIVQQQVITNAVRKEIEKRTGEKEAITTATWFMRKEEILTDLNVDAVDDISLKEEDDFISLVEKEGYDVIFADPCMERMIPGFEGVFIPLTHFAVSGKLNVMITKKIRVYGIVQGVGFRPTVSRHAAAAGITGSVCNKGPYVEIFAQGEEKCVKDFLERLEKQPPKRAAILKINTEDVKEEEYGKFNDFQIIESEKTKGEIFVSPDIAICDECKKEMYDPKDRRYLHPFINCTCCGPRLTILDALPYDRERTSMKEFPMCPDCASEYEDPATRRYDAQPVCCNDCGPEVYLTGREERGRAAIIATRKMIHDGGIVAIKGIGGFHLCCDATNEEAVQRLRTLKNRPAKPFAVMARDVEAVKQECLVNEVQEEILDGHQKPILLLEKRKKSADSTGLCKSVAPGNPKVGIMLPYAPVQMLLFRYDDGIQMPDYLVMTSGNASGAPICRDDKEAVEELSQLCDLILSHDRKIRIRADDSVMDFYKGEPYMIRRSRGYAPLPTMVTMPWKGQVLAAGGELKNTFCIGVDGRFYLSPYVGDLEDLRTVKALQETIHRFETLLEVEPEVAACDLHPKYNSTVVAEELGLPVVKIQHHYAHILSCMAENDRKEQVIGVAFDGTGYGTDGTIWGGELLLADYHGFERMGSIEPFLQIGGDISAKEGWRIAVSLIYQQTQDKEQTMEIVKKLNLCSEPECKVILTMADRKMNAVTSTSAGRLFDAVSAILGIRTKSTFEGEASMALEFAAEAYEEELREIDEPADGESDPDEEKKEPEERLIMKTGSLIKYLTEKKTEGIQAEKLAYIFHQKLADLITDGCRKIRKKTKCNCVALSGGVFQNRLLLRMVEEGLEKEHFTVLRHHLIPANDGGIALGQAAYAMQYIQEGKMCVGLSAKVVRISDGTAVVDAGGAKREVSSELLEDLEPGDYVMVHAGIAIAKITDEDDSETEQLMEELLMSEGKKTARQIIEGYDGPAVRIMEVCGTHTHEIFRLGIHKLLPKQVELISGPGCPVCVTPVSYIDEAVYLALEKSVTICTFGDLVRVPGSKKSLADARSEGGKIHIVYSPADAEKYAKEHPEEEVVFLSVGFETTTPAGCLSVKKAKEEGITNYSMLIANKTMPQAYEALKGSADIFLYPGHVNAITGTKLCEELVQEGVSGVVAGFTAKELLTALAVALTHFQKGKPFFVNCYPRVVTEEGSKEAQRLVDTLMEACDSEWRGLGIIPGSGLRLRDEWDMYDARKKYQVPKMEGRANPACRCGDVLQGKCKPSDCKVFGKVCTPQHPVGACMVSGEGACSAYYMYGREMNEYVDNEARKAKLVGKTVTMAHGAGGRQTSELIDMIFKAHFDNPDLTADDAAVLTPPIGKMAVSTDGFIVSPAFYPGGNIGKLSICGTVNDLSCMGAKPLYLTCAFVIEEGFPMEKLEEIAEAMEKTAKEAGVRIVSGDTKVAGKGQVDGVFITTTGIGEITDGVEVAGNLAKPGDAIIVTGDIGRHGCTILLAREDFGIEADVTSDCAPLWGNVKAVMDATHELHVIRDATRGGVGTVLYEIAGQSQVGIRLDASKIPVAPEVRGVCGMLGLEPLYLACEGRLVIMAPKEQAQTIVDALKACPYSKNAAIIGEVTEEQPGKVVMLTEIGTQALLPQPGGELLPRICMDTRVAVISIIVENPEAIETLNHLLHEAGQFIIGRMGIPYREKGINIISIAIDAPQDMISTLSGKIGRLNGVSTKTAYSNIITKAGEMIKIAVYGKGGIGKSTTVSNVAVALAEKGLKVMQIGCDPKADSTIALRHGEAVPTVLDLFREKKQDLKLEDMVRTGYQGVICVEAGGPTPGLGCAGRGIITALEKLKETGAYEVYQPDVVLYDVLGDVVCGGFSMPMRKGYADKVFIITSGENMAIHAGANIAMAVENFKNRGYASLGGIILNRRNVAREEEKVNELADDFQTQVVGTLSHSGLVTEAEEKKETVMECFPDSEMAEEYRKLAEAIYELSKRPEGSACEKADEKYTADKRPGEGLKCMLKKAGESTGLEFNSPAHGNWNIVHTGMLLPESIQIYVCADNCMRGVVLTAAEMNAADRFSFVIVEEEDLLNGNLEDVTIEGVTDVLRKRKDHPKAVLLFTVCLHHFLGCDLERVYEELEARFPDIFFVRCYMDPIMQKHGLTPDQKLRKAIYDGLKVREENPKAVTILGSDFALDETSDIRRLLKWKHIEVKELPECNSWKSYQELADSKIFIACYPPGKYGLECQAERLRKKALYLPGSFDYDEIIRQWKTLEQAVGENVEEVEGIEDTDMHMEKSLERITKREIALCESALEQARKVVGDVPIMIDHTFHPRPLELAKLLLTQGFSVTRIYLDAVNPEEKDTFEWLKEQYPELEYEPTIRPEMRMKPRNESDVLAIGQKAAWFTGTRHFVNLVEGAGLYGFDGIRRTAELMTEAWQEEKDPEDLIIRKGWGCESCIMRQSYRIIPIYTADVSGVCSALYELGGMTVMHDPSGCNSTYNTHDEIRWYEQDSMIYISGLTEIDAVMGNDEKMICDIEVAAEELKPKFIALAGSPIPYMNGTDFPAIARMLEQDLGIPAFSIPTNGMHDYVYGAGLALAEIAKRIKGKKEVTSKSVNLLGVTPLDFGPQEHVDVLKRNVEETGWKVLSTWAMGDTLEDLGRAPEAEVNLVVSSVGLWAAKVLQERFGTPYVIGTPIRGFMKSLLNAIEEKKQVAYLEKGRRISLTGNKSEKSSENQIILIGEPVIMESLAVAIETEYQISVRVICPIREKKGLLADGDIAVRGEEELEQVLQRSKNVKGIVADPLYRPVCLENVAFYELPHIAFSGRIYKKKLPVLAELIMGHFYFARHGQTVWNVENKICGATDIELTELGHQQAEELGQAILEQGIQIDEILYSPLIRAKETARHVSEVTGIPMREEMRLKEQNFGKYEGTPRNGEEFQKAKANFINSYEGGESMLKLCHRIYDLLDDIKKESDQKTYLLVAHNGISRAIQSYFCDMTNDEFARFGIKNCEIRKFEYEEMKKDEKMSIEDMTAYMRIVPERKASYAEFPDTMNDEIKEYLRKQGINALYTHQTEMFEKAGRGENTVITTSTASGKTLAFLLPVLQKILEDPLTRAIFVYPTKALASDQYRSLQPVLEYFGEGKIQAGVYDGDTMPAERSRIRKSANIILTNPEMLNSAFLPNHSKYGFDFIFANLRYIVIDELHSYRGAFGAHLANIFRRMHRICQYYHSNPQFLCSSATIANPVELAKKVCGTAFSLIEKDGSPSPVREYRIIQPPEIKGHNDKVYGRYAASTVAADMLPDLVKEQRHFIAFGKSRRTVEVILKETRDKLDAAGFLSQADSRKIAGYRGGYTPLERKEIERKMMSGELNGLVSTNALELGIDIGSLDTTVIVGYPGTRASFWQQSGRAGRNGQTCVNYLILENQPFDQYIAVEPGWLFEGKSENAIVDPDNLLIELAHIRAAAAELPLSLDDAALFPSLGEIIPVLMKAEEVKSMAGRFAWSGPAFPAGDYSLRNMDKTRFKLILDNENREITEMDESQAYHELHPGAVYMHDGALYEVLKLDLVSRTATAKPFEGNYYTVPAGTEDIRILQTFQEKTVERTKIHFGDINVDEVISMFKKLQFHNHQNLGYVSLTQPLQKDYDTESTWIDIPEDVVRVYRSLLLPNGAGELVLNNHFEGLQNAIKNAAMMVTMTERDDINTGMSNNATVQGYVDSGSGESEGHEVVSLFIYDKYEGGLGYSEKIYELIQEVIDHAIQMVKGCSCEDGCPACVGDYTLSKKMVLWGLRSLKERLEAPEYVKKQVEEERPGVRKQYSFFKLPEKWNEFCETVIKNGESGGAFLKTAKRVEIEKHNLILIVDSYFYEDWLKIPENAKSIKNILKFHAVCPQDMEIVVRTEEDMERKKKTEGKLKRRYEDKFMDFKEEWNWLNSYQMEAVTDENDACIVNANVGSGKTTVLIAKILYLHYEKKIPLEKMVVLTFTNKAAGEIIERLKKKEPGLTEEQVQFFGTFHSVAMRMLKNTLLQAKAENGEIAHTVENSSMAPEEWTSEFEIIDPDEEQELALCLIAEYSLKVKYKNRLKKRLEQEYPNYKAGKVTSRYKDELFRLYPLLQKEKKKENKMSFSDLLEEGTRLLKMGKNSRPEWIIVDEVQDSDRSQLEFLEALKGSETKIFAVGDPNQVIYSFRGTTQNMFFLLKNRFQAKELSLPVNYRSNASILEAANRFLQFGGKIQGSNECGEKIQIRNHYNPFQEAMYLADKIWTLHQEGKEYRDIAVFYRLQKQAEILEKMFAEQNIPYEVSVKKSWKDIPVLNWLMYVLRFATHPDDIQAGMQVLMDKRFGEKCTKKKAEDIIKNHKTEKSDIYKNMMLFYTEKEVLSGEDIFDSLGLKEALHPTSADYQQDAKQVLDFLNQICTYSREKKLNMSDGIREFLNGVALGTIESPEDTQESAEKEEAGGRVKLMTLHASKGLEFDTVFIIGVNPGLLPIRCSSFDQEEEERRLFFVGITRARNHLELSYYTNPGEPGVLGSYSNYLKMIPEELLEWKEIRSDEEKRTNLKELTRRAKEEIRKAEAQKAENVQEQKTESEKTENVQEQKAIHPKYGTGIVTSEDDMMVEVEFPNYGKKQFIKAFQEVEMIRMTLVPGGHDCYCGRQGCAECYCSLNSLLGDSDNLEEFFEKKSAGDTGCIERWEDYLRHLSILINNLHMVLEHTVILGGHVAPYFTDEDLSKIRHYVAERSTFDDDTSYIIPGNHADIIFRIFCLFIVFHIFFRLPIDIFTFVRYYNINKRKGGRTTNQLNLYLKSKERGTVQCRGQSKLKRVMICAMAGTAIVMSITAPLVKFFGHGNEGRGYLITMTIYGIAAMCIFFLTFAMQPDVIDYSEYKKNASVAGLIAAFQGFFVVCMNTLKAEKRSMDIKAKKLRREGYVTGNVFGREMKESVPVKMEKAAVDRLLKACHKGSQVMLDIEGEKMNVLIKDVEFNPLKGQVDEIDFQALVSNEKVHSVAEIVLVGHEKDAGGVLEQLLEEVQFKAYPSALVDKVEVDVSNMKVGDSIKVKDLTLSSDKDVDVMTDPETTVVTLQYVHNSEADDDADEEAAEATEMAKEQFAVIEMVTNMILGKTEGISKVDFVPQKTRCSEPENGMHMHDKVPVIQDQDIEKTKNQQQIFPRKTPESQGIVSDHLRYLIQELADSPNTDMHHFMVLRHGNVICEADFAPYRKGIWHITHSMCKSITGMAVGFLVEEGKLELSENIYKIFSDKGSTWVKMFRPEVTVENLLTMTSGVTFNESGIVSGNDWLESYLNASVAEKPGTKFQYNSLNSYVLSAIITERTGMPMDEYLKPRLFEPLGITDYLWEKCPRGITKGGWGLFMHTEDMAKLGQLYLNNGKWNGKQIIPESWAEASVTKKVDSIEGTYGYGYQLWMEERPGSFEYNGMLGQNVLIYPDVDMVIVTNAGNEELFQDNVMLNIIRKYFPVDWMPKETLPENPIAYAKLQELTERLAGKRLKNDQYYNSPLIIGKGGWKKNSSKYRVRKRQTEIEKVQNQQIHLLTDLLDGTCYEMEQASVGLFPLVMQVMHNNMTDGISKINFYKRRTKELQQTLILCFQEGEESIELEMGWNQYIENKLSIHGETYLVAVKGELSSDVDDNPVLKVEIVYLEEAMRRKLYVTFVKDTSASKLITPEYIEIKWYESPGKALIMEGMESITTEVTKHPIYSRIRENGGIDLLHRLMEQTIEPVIKGKLIDPDTEMKVVVAIDSLKGSLSSMEAGLAIKEGVLAAQPDAEVIVKPLADGGEGTTDALIEGMNGERIDLTVTGPMHTPVDAYYGYLRETNTAVMEMASAAGITLVPDKEKNPLLATSYGVGEMIIDAIQRGCRNFIIGIGGSITNDGGIGMLKALGVRFLDEKGEDAGEGGQALAKVACIDLSGLNPLLKECHIQVACDVNNPLCGESGSTYVYGPQKGVTEDMKKTLDEAMAHFARVTSESLENDYMNTPGAGAAGGLGFAFLAYVGATLTPGIELILDAVGLEDELSGADVVVTGEGRLDFQTAMGKAPVGVARLAKKYNARVVAFAGSVTKEATACNKEGIDAFFPILRGVCTLADAMDPVNARNNMIATVEQVFRLFMITHIGKQLATQIVDTVHDVCGHDINFINKNGLIYASTNTSRIGSFHEIGKKAADTGTVIEVQESEHYKGTSAGVNIPVTHNGYLIAVIGISGSPDEVRKYAYLAEKITRLLIREQELSAASRTLSEKRTYLLSYLLAGSRSFDAAEAFPDKMKDLNYIHDLLNEFQINTASQKRILIIRMLSTHSSVTISSMEEKILQMFADHSIRLYMFQYPQEYLAVIDAPFPLEQLQTFYRTLSDSIQIGIGRTTDLFKVSSSYDTARIALNSLSEPDCNYALFDELTLEILLGSINETAASEFLQKTIALLDETDRSVLSCYFEHEQSLSRTSEALFLHKNTLQYKLDRIHKICGLNPRSFRDGVILYLALRLRTFMKKTDTNLKQIAYETIKQKIIQCEYRPGDILSEMMLMEEIDASRTPIREALNMLAQEQLIQIIPKKGIIVLPLTMKEIAMTFEARMLMEPYIIETYSKYIDMEKLHELETKTETILNQEIHEQKDSIVFCTIDDKLHRTIANACRNKYLNMNLSQIYDQNMRIRILGEQNIWERHKVAAREHLELIRYIESGDIPSAVAAIRVHLIHSKEAAFSSFLMMRKRWKRAIAVMMFAAVMVSGCGSNTAKKSSAEEPVHITFGHGQAEGHPYHIAALQFKKEVEKKTDHRVIVDVQPNGNLGDEREMTEGLQLGTIDITVAVAATLSGFDSDLDVFNFPYLFDSREEAFKVLDGKTGQKIFKGLEKQGIETYGTFDLGFRSMTNSKHPIETPEDAKGIRMRTLESSVCVDSLSELGIDAVSMSFGELFTALQTKAVDGQENPLFSIYNSRFYEVQKYLSLTEHFYPVCPVMVSDLMWEKLSDEDAVIVKKELHDMVQYERKVSGEELDKTLQKLKDAGMEVNTVDKSKFKEAISPVYEKYDAQYGKLLKEIEKAKEEMMKIIHDIDKVINKILRFIVIIMLSVMSVVVFAQVLFRIVHLSIPWSEELSKYLLIWSTFLGAAICIRKGSLVGLEFLKNSMSEEKQKILQTILNLIVCAMLLFLINVGFWAVRRVWFQITPVLKLSMGLMYAAIPIGSVFMLINQILVTIYLWKGEENAMTALLFISMIVLLIVGVPIAFVLCGSSIIAILSTGDIHNAIVIQRMFSGSGSFTLLAIPFFVLAGSLMSSGGISKRLVNLCNSLFGHISGGLAMVAIITCAFFAAISGSSAATAAAVGTIIIPEMLKHKYDKDFAGATVASSAELGVIIPPSIGLIQYGVATGTSISDLFMAGFLPGIFICLVLCVVAHFLCKKQGFEPSKKATRQEKIQAFKDAILAILMPVIILGGIYSGVFTPTEAAVIAVFYGLIVGVFVYKEIKLSDIPRILTDSAITMSTVLLIMSASTIFGWILTKLQIPQAVAKGFLGISASKYIFLLLVNVLLLFIGMFCEAGAAMVILAPLLAPVAQTLGIDLVHFGIIMMANLAIGMMTPPVGVNLYVVCDTAKVKIEGMFPYLVKYFLALVAGVLIITYVPQLSLLLVNLFGQMKITDIKTIKLQYPYKKWIADGCGSCGARGAFLILVETDTDLTGIGESATFGGSMDALEAIVEKQLKPLLLDEDPTRIEFLHQKMMWNNWANGRKGLVMGAVSGIDVALWDLLGKAAKLPVCKLLGQVTDKVQGYASAGFYAPGKTLENLQEEIEGYIRRGFTAFKMKIGRTSNNHKMRLQFMNNGDFYLTPEEDKARIELVRRTIGPDKTLMVDMNCTWDLDDVLNAKEFFVQNDIFMVEEPIRSDDTAGYIRLTKELGGIKVAGIESEQGVSRFAELIKADAMDVVQASLGWAGGFTGCRNIASTAHAFNKLYTPHSFFSAVMTAANIQFAASQVNIPFIEAEENENPLRTELLKEPIETDEHMNYYITDKPGLGIELDLDVIEKYIIKMKVGFIGLGIMGKPMAKNLLKAGHEVCVNDFHPESVAELVEAGATSAATNAEVAKDVEVVITMVPNSPNVRAALLEKDGVIDGASSDTVIIDMSSIDPVESKKISAELKEKKGIEMLDCPVSGGEPKAIDGTLSIMCGGNKEIFDKYVDLLKAMGSSVVYVGEIGSGNVAKLANQMVVASNIGICAEAMTFAKKMGTDPELVYQAIRGGLAGSTVMDAKVPMMLEGNYKPGFRIDLHIKDLNNALNASHAINMPVPMTAHMMEVMQELKNHDEGSCDHDDIIRYYERMTGVSVVKGKMNTEFIKGVIVPIITTIDEDEKIDEAKMRAQVDYVIDGGLQGILAFGSNGEFYQIEEDEMERGFQIIVDQAAGRVPVYFGIGAINTKKCVRLAKMAVKNGAKGVSILQPMFLKPNFNELFLHFKTIAEAVPETPVLLYNNPGRVGYTLGADLVEKLAHEVDNIVGMKDTSGDITQTEEFIRRNRDVGFKVFGGKDTLLYASLCIGAVGGVCTAGNFMPELIVDIYNKYVAGDIKGALEAQYKLNPVRLAMDVASFPVAAKDMAAMRGRDVGSPYLPNLSTPEGVSYDKMKKEMEKAGLIMKHTVTLRNGDQVPALGIGTWYLGEDRTKRKQELESLKEGVHAGMTLIDTAEMYGSGKAELLVKEAMRDILKEMKREELYLVSKVLPNHAGKGRIETALDNTLMRMGVEQLDLYLYHWRGSYPLEETVAEFERVKKAGKIKEWGVSNFDIDDMEELWETPGGQNCLVNQVLYHTGSRGIEYSLLPWMREHEVALMSYCPLAQAGTLKRGLMTHPVLVGLAEKYNATVEQIMLAWNIRDGYTIAIPRSGKAEHTLQNAGADLITLSEEDYQAIDRAFPKPVRKEYLDMQMKRIFWIVLDSAGIGEAPDADKFGDVGSNTWKSCYDSGKLHIPNMEKIGIYQIDGMEYAKSTENPTGSFAKMQELSCGKDTTTGHWEMAGIVTPDPLPKFPDGFPKVFIEEFSKRTGRKILCNLPYSGTQVIHDYGREQEETGALIVYTSADSVCQIAAHEEIIPVEQLYEYCKIAREMLTGDLGVGRVIARPFIGTWPNYERTIRRHDFSLAPPRQTVLDALKAEGKDVIGVGKIYDIFEGQGVTETYPNQGNEKNMEKTIEIQKKEFDGLCYVNLVDGDMIYGHRRDIAGYAGALTRFDEQLGEFLANMRDDDMLMITADHGCDPGYTGTDHTREYVPCLIYGKEIKAGVNLHTRKGFADMAATIAEALGSKYRGDGESFWDEIRNMSLPPYRKIDQSTWSRQDHYKYYTEKLKVNYSMTVRLDVTRLRAECDRFGVHFYAAFIWCTSNVVNRLPFMKMMTDEEGNPGVWDVVHPNYTIFHKEDHTFSDCWSEYDADFATFYKRIETDIEAAKKVRGVKAKAGQPVNFYCISCVPWLDYTGYATSTVSDHVALFPIITFGKYTEDNGKLTLPLTLTIAHAAMDGWHTSEFFREMQEELEAFAIFKYEETGVEGAEFEVYAKDTIYSPDGAKDEEGNPVVRYEKDDLVAKLTTDENGTAVIYNLPLGTYYLKEVVAGENFVLNTEQKEFTLTAEDDTQAVVYEGVTYKNERQKVFVSVEKKDSVTGEKLEGVIFGLYAAEDILSNQGEVLVEKDTLLEKKATDAKGTLTFDSDLPHGKYYVKEEVRKAGYLPNEEVWNVDATYENQNLAKIELNKEVENQPTETRITKTDATTGNELEGAKLQVIDKDGTVLEEWISTKEEHVIYGLPEGSYTLHEELAPYEDGYVSASDVTFEVKEDGSVTKVEMKDEYSKVEISKTDLTTGKELEGAKLQIIRKDGTVLEEWITDGKPHSVAKLPVNEELTLREITAPDGYEIAEDVTFTLKDTMEVQKVEMKDARTPEKTTEKTNAPKTGDNQKVWAFVLLALASAGTATGVTVYRRKKSKMTDNKEETEEKMRRFYTAESVTEGHPDKVCDQIADAILDECLRYDPSSRVACEVLATRGNVFVAGEISSGYEPPVFDVIRKVLEECGYCTDGIEMDTFVHQQSPDIAKAVSVSKEFRDNIGAKIRDRSRGAGDQGVMVGYACDDTPQLMPMPTVLAHRITRELSACRRSGYIKDIFSDGKAQVTVEYEDGKPVRLESVVVSCQHGAEKSLKKLDAEIREKVLRSALRLLPPDEDTKILINPSGKFVCGGFDADTGLTGRKLMVDTYGSMVPHGGGAFSGKDCSKVDRSAAYIARYIAKNIVAAEFASKCQVSLAYAIGVAEPVMIEVDTFGTGKVCADDCLAAAIPLVFGVTPVQIMESLRLNRPIFRQTAVFGHFGRKEFPWERTDKVLALQDAILMPWVTEEEIQAAKNMTAYEYLRTHQAQRLQKTRTRNEWQLTDHDSFKINELSSKWHWKSRDIGGVSALRFLIEVDGMKFTDAVKLLCEESPSFIPTQSVEREKLPFKLPERYCNCRRIRDYLNHRGISDEVITYCISHEILYESVPYHNAVFVGKDEFGKARYAFLRGIYEKNGKGFKMEQTGSEKKYSFCIPPERETKRVAVYEACIDALAHMTLEEGKRDKYRLSLGGIAAPKENVQIQSERFKKPPDALEEFLKNHPEIKEIEICTDNDFAGRWAKEQMKKHYEGTYQIICNLPEKEGADYADLAKEKKQANKCRDRPLERRMEEKGTMHVHLLTELTGNLFSEESEWEEDWSESDEYGMPLDGTELADYEDAIREELERYGEDDLMQYFDGSESIHGKIQSAVVTIENKDGILYGCTKLELNEFLSQEELQEFIEYITGQYSDGWGEGFEQRDIKVDGGMLNVHFWHPDMEQPKIYEKKTEQIPIKPEKQRPKLQLLEHDGNIFSIMGDASTLLKKNKQTAEAKEMCKRVLESGDYYKALLIISEYVETELSPPPKENKKTKKKNQPERMTNGLSLEELMKEGTYPEEYAEGENWKILHGDTLKLVKAFQPGIFDAVITDPPYASGGTKQNERNRTTNQKYSSMSAANALPDFDGDNKDQRSWTHWMAEWLYDVRKACKKGAPICLFIDWRQYPSITDALQWAGWIWRGTAVWDKGNSRPQKGRFRQQAEYIVWGSNGPMPINRPVSCLPGVFRYGNPQNRIHVTEKPLQLMKDVIQICEPGGLILDPFAGAGTTVLAAVMTGYRAVGIEVTDAYYKLGSDRVRIALEAEQKEDEKMEQALAYVCCSAEESRVKVQKYCRKIYELGYVPICPRFVFSPFLEESDAEDMQGYGRMSHILLRRCRMVVVCGKEVTGTMNTEISMADRLHIICTTLDGLVQIKESKMLRDGVMIMIALMFGGCFGVVVTCCMVTAKRSDQELGDMMKEKREGTVMQCENETMMRKRNHVIPVRLNARELRELEEQVEKSGLSREEFMRSLILGAQVHAKPCEHHPELLRKIAGLCNNANQLAHVANASGMASEQSVQEMLRLTKETWHLVKEEWMAYTSVIPVHRLDRSIEYVKDKEKTTQKADSLEAAIDYAMNRTKTEQAVFEDTIGCINENAYADMVATKKRFHKMGGVEGYHLVQSFAEGEVTPELAHLIGQELADRLLKGQYEVVITTHLNTRHYHNHIVWNSVSMVDGHKYHSNAKSYYTEIRKISDDLCRKYGLSIIESNQKKSIPYVQWKAEQEGKPTWRTAIRLDIRESVQESYSWSQFLKEMEKRGYTWKLNRKYISLKAPGMERYIRLRSLGKNYSEEEIRGQILQPKVKRVYQKAVQIHPKKKLTGIQALYYSYLYQMGVLPKRPKRSPYAVREDIRKLDRRIEQIEFLMKHDIITREQLAAYREPLQKQIAELMKERRRLYRNGGSKTGEERLSEINEELKRLRKEVRMTVQIEKHSLEIEARLQEAEEQSQDEKRVEDKERMQKSQEVRMNYGAEPADQVVRYSLEGMEYSLKITGNVAKHVAVFIAAALKDQKKTRGKTRLTRMLKEQRPMKFFTVPGDRLKEFAKEAKARGILYVVIKDKVNPDQTEVMVFADDAAKMNRVLDRMNLDFVKAESGSMVTEAVEKETAPEKAENQMEKESRENVRTETVVLPEGKIEFELVDAEEMFQIGDEAFPEGNFTQAQEGEEKNPSEPFSRNRNTSSDRETSWKEKNKKPSVRKELGDIRKEQEEKRKRPDRRKNARESRKKRKNMKTKGRMYMDLTDMISGGTEEQPIPEQKLTKEEYAAKKQQEREEVWAEVDSQAQGVFQDGEKLKGFLDFMAECNTQRTPNLLLIYGQHPDFKVVRSYERWREEHRSVKAGEHGITYMISTEYEKDGEMRRGYTIGKGFDISQMSGKPLEERPQRSLTELIGTVLKDQSVRVQIEDDLPDKVQAQYNPRYRTIYIRNGMSEVTTFHALNRELACAALDQHTGTYSRQKVSAQAYCAAYVIAKRYGVDVTGFNLEYIAQRNECGKKDPQELRDFLNDVRQASYSIRNHIERNFGAKEQEYVTDEFAIGDPVKTPETKDEKASGKEKKAKNQPERMVGVTKKEVSQMTKYYLKMDNIMKNMFVVALNDELQAQSEQDECLEETKALLKKVSEYDLAQKRLQITAGEQRQIRKALNRLRSKYLAAGRYSDGIDKVIIQVAKPNTSRHMFWMVIYSREKVARLREQYPAGTRICLNSMDGEAGMPQGLEGTVQYVDDAGQLGVKWDNGRSLSLIPGVDSFHKKEGQGHPEEKPRKKRESDLQRMEHGSAKWGNVSEICRRYCEKQYTNNLLLTQHFRMGLDGYKHKRNLNVLVVGGSGAGKSRTYAIPNIMQCNCSMVITDPKAELLRKTGGVLERNGYEVRVFDLINPETSWCYNPFAYVRDDKDVLKLINNLIRNTTPKGAQSSDPFWEKSETALLQALMLYLLHEAPPEEQNFPMIMEMLGSAQVKEDDEDYQSPLDILFERLEMRDPESIAVKQYAIYKQAAGKTAKSILISVGVRLAAFNLKQIANLTCTDELDLYSIGEKKVALFCCIPDADTSMNYLVGMIYSNLFQTLYYVADRKYGGRLPIPVHCIMDEWPNVALPDDFDKILATMRSRGISCSIIIQNIAQMKALFKDSYESLIGNCDEFLYLGGNEKEGHKYVSELLGKETLDTNTYGQTKGRSGSYSVNYQQTGRELLTPDEIRLLDNRKAILFIRGERPIMDDKYDLKKHVNFRYTEDGGASPYDYAKTPLAHDDLKIDINRLDDYELLSTEDILGEMKKLLTGEKNRIKKNTTKKMTTPMPMGRKQKKWMGLYMTLVLIATVGATTVFAAGDPLSVINNLSTFIFSLIRAIGLILLGFGVVQVGLSLKSHDPSQRANGFLTLAGGVIITFAKEILDLIMAMSDNWIVQNLNSALSTWSEKMAELWTLLTENPATFKGGGIWRIMTNINDTLTAIAYGLLVLFFAAGIIKTCGSFTDLKKPEHVLKAFIRFALAQGAITYGMELMQALFSIVQGIVTTVMSGSSMAGSVTELPTEIVDKIESVGMLESIPLWIVTLLGSLLITVLSFVMILTVYGRMFKIYMYTAIAPIPISSFAGEPTQSIGKNFIRSYIGVCLEGAIIALACIIFSAYAASPPAVGDTELSAVTIVWNYVGELVFNLLVLVGAIKASDRIVREMMGLGGMDTKKTLRYNWEFGRETVAIRVSSYRNNGNLYVGLCHKEGREWEDFGDVTINLPYQFLEPNEAFITGDFTKDMLHFIKEHKLGKVLNETGRSGYATYQKVAFDLARLAEFDPEGVAEHCRLAGIEVPKEKPQKTKKQNRGEERMEVKMNKEIRDYQESMFMGLDLRQCVCSVLAILTAIGIYFGMRDITGQEITGWLCVLGAAPFAACGFFKYHGMTAEQFLWAVIKSELLYPKKLVFQSEDIHYSCMQETISLGEKNQKDGAEIIKEREQRAEAKQRKKRKGRSDAFDMIKTLSQALRMDKERFKVPKSVQQAIPIQRIWPDGIFQQGTKFSKTYRFTDINYYIASKDNKTEMFLDYSELLNSLDSGISAKITINNRRINKEEFEKSILLPMKEDGLDHYREEYNEMLLSKITGTNNSIYQERYLTVSVHKRSIDDARTYFARIGTDIVTHLAKLSSTAEGLDAESRLQIFRDFFKGDVPQAFPFDLKQFAKKGTSFKDWMCPDSMEFERDHFKIGDRYGRVLYMQDYASYVKDDMISELCDFSRNLMLSIDILPVPTDEAVREIQNRLLGVETNVTNWQRRQNANNNFSAIVPYDMELQRKETKEMLDDLTTRDQRMMFGILTMVHLADSKKQLDSDTELLLSIARKHLCQMATLKWQQVDGLNTVLPYGLRKLNALRTLTTESTAVLIPFHTQEILQPGGIYYGQNAVSKNLLVADRKKLMNGNSFRLGVSGSGKSFSAKEEIVHLALSTDDDILILDPESEFTKLVEALGGQVVKVSATSDNHLNAMDMDAAYGNEKNPLIEKSEFILSVFEQLVGAGNLSAKEKSILDRCAADVYRDYIRSGYTGEVPTLKDMYRQLMLQPEEEARGLALSSELFINGSLNTFAQPTNVNKKNRIMDYDIRELGEQLMPLGMLVTLDSIFNRVIQNWKEGKTTWIFADEFYLLFRYEYSANFFYRLYKRIRKYNGFVTGLTQNVEELLKSDTARLMLANSEFLILLNQASTDREELAALLNISENQLSYITNVSVGSGLIRCSGNIVPFENTFPKNTDLYKLMTTKPGESMKKKEEVTITFYAAECGEFHDLGEYTKCRTLEEAYKKYQKYCRTSANMCPAIEFSIHDPDSIYSDVEYRLPLSSKDRGDLELVPYYNEHPLVNEAIRQLEQLQKQQEKKKHRDVARMRDIKERVRDKNPKIRNPAARLPKELVRQTVLKAKEKPRELHEKSSGQSDSPTQYGTEKIESVQYRAASVAGKTIGKTTYRGGKKLAGVTYRKIKERKSRQEEAMVQGAESGMTKKILITGGAGYIGSHTALELLNEGYEVVVYDNLCNSSKESLKRVEELSGKHITFYEGDVMDETALKAMMEKEGVDAVIHCAALKAVGESVQKPLEYYRNNITGTLTLMDVMKQTGVKNIVFSSSATVYGSPEEMPITEECPKGQCTNPYGWTKSMMEQIMTDVQKANPDMNVILLRYFNPVGAHESGRIGEDPKGIPNNLVPYISQVAVGKLEKLGVFGDDYDTPDGTGVRMTEYKKLTDEELIRRLRMGETGIIDYLMEKYKNLVRKEANAMYLLGGETDDLIQEGMIGLFKAVQDYDVDQEASFFSFARLCVTRQLYSAIEASNRKKHSPLNSYISLYEREDGEGSLIDMMESEHETNPEELLVSQEHAKSLEERLEKDLSELERRVLYLHLMGTDYKTIAKLLDRSPKTIDNALQRIKGKMQRILEKEKMSHDKNVHDKKMHDKKSYDKKENENIIEGRNAVMEAFRSGKPVDKLYVLDGCQDGAVRSIIREARKHDTILNFVEKDRLNQLSETGKHQGVIASVAAYEYAEVEDMLKLAEEKGEDPFLIILDNIEDPHNLGAIIRTANQAGAHGVIIPKRRAVGLTATVARTSAGALNYTPVAKVTNLVKTMEDLKKKGLWFVCADMDGDVMYDVNMKGPIGLVIGNEGEGVGRLVKDTCDFTARIPMKGDIDSLNASVAAGVLAYEIVRQRMQMEKSVEWEFDTYMQEIFRMKEVDIKEYSPLTLAYIGDCIYDLIIKTLVINEGNRQVQKLHQKTSSYVQASAQSKMMRTMQEHLTEEEHAIYKRGRNAKSVSPAKNQSITDYRRATGFEALLGYLYLKKEWKRMLELVKIGLDSIKEQMKIFNTMTKKKEEFVPLEEGKVKMYVCGPTVYNFIHIGNARPMIVFDTVRRYFEYKGYDVNYVSNFTDVDDKIIKKAIEEGVTADEISKRYIAECKKDMDGMNIKPATKNPLATEEICGMVDMIQTLIDKGFAYEKNGTVYYSTRKFKDYGKLSHKNLDDLRSGERSLLVSGEDEKEDPLDFVLWKPKKEGEPAWESPWSEGRPGWHIECSEMSKKYLGEQIDIHAGGEDLVFPHHENEIAQSEAANGKEFARYWMHNAFLNIDNRKMSKSLGNFRTVREISEQYDLQVLRFFMLSAHYRSPLNFSADLMEASKNGLERIVNAADNLKFLMGNAKAEAITDAEAENFAKTEEFVAGFEKAMDDDFNTADAVAAIFDLVKYINTTTDAESSKEYLQKLFDLLVKLTGVLGLIVDKKEEILDEDIEKLIEERQAARKAKDFARADAIRDELLEKGIILKDTREGVQWKRAMGIISYVNEEIQVIRERDPAIKSNMEVFLYSSFKAILHYRIAHKLYLKKHYFLARWVSQRAARKTGIEIHPGATIGKGLFIDHGSGVIIGETAELGDNITLYQGVTLGGTGKEQGKRHPTLEDNVMVSAGAKVLGSFTIGENSKIGAGSVVLKEVPPNCTVVGVPGRVVKMNDEKIPRLDMDQVHLPDPIENDIRALQEDNLRMHRQIQEMEKCMQCLKENPIPEEKKEEISENEDIMNGKSSRCDVSKERNCHRLKAVLDYSFCEVRPGVGPVKKMKSVIAGSGITHVTCTEGRIRVIMDTKLKSRRKLGIFLIIVTILSAAYVMLYNYDVIYEKAVEEAQKTYTTSLSDREYLESFLEFSYILYNQEISSKTGEAKMSQDEINDVADVWMEDYEALYPYLDYRIEDGSGTVLGRSTANTGNGLTDDSFKEYAFGMVLTYDEHGNPDVKVVKSGEKTAQSIVLRKIIDNWSETVEDATYGELKTPKNRTYIYGMKKSSIEQYLNQWYWFGDEAPNDAWYMMLACMAAVCVAAWIFAQSETLKIGGGKIFRQPFEVVFVVASITLGILDDKLNWIITREEGLPQPMDFAIWVGVFAVTYWVTTCISAVQKIGLRKYVTERTLVWRMWKALREEAPAAAERVGRDGGRLYRKVKKLANRVYEIVTDIDFTDKGSKAILRIVLVNFIILAVTSVWVYGIMALIIYSAILYFVLKKYFNEVKRNYHRLLEATNEIADGNLDVEIDENLGVFEPFKEEIEKIQSGFKKAVDEEVKSQRMKTELVTNVSHDLKTPLTAIITYVNLLKIEQDPERQKEYIDVLDRKSLRLKALIEDLFEISKASSKSVNLNIANIDIVNLFKQVKLEMEEKITEANLDFRLDIPEDKVIVALDGQKTYRIFENLIGNAAKYAMPHTRVYVKIAAEDGDAVFQMKNVSANELTFNPEEITERFVRGDSSRNTEGSGLGLAIVKSFVEIQKGKFWIETEADLFKAEIRWKLVDKKDDIAMRNKMEMNHVLVVEDDKEIREGVEIYLKSQGYEVFQAADGVEGLEVIEKEDIHLAIVDIMMPRMDGISMVVKLREKYDFPVIFLSAKSEEVDKIMGLNMGADDYVTKPFTPMELLARVNSQLRRYRRFMEKLGDKEENSRIHTIGGLEINEDNVEVTVDGEPVKMTPIEYKILLLLMKNPGRVFSAEEIYERVWNERAINTDTIMVHVRNIREKIEVNPREPKYLKVVWGVGYKIEKQAMKIRKLETEEKQNTKKLYEEVFSEDSKSFVDYYYEEKLKDNQIYAVEEDGEIQAMLHLNPYELAVNGSKKDVNYIVAVATRESYRKRGYMAGLLKQALNDMYADGETFTFLMPASESIYLPFDFRTVCEQNRSYYDPEEETEEGVVITDAVNADAEEMAAYMEAQLTQSYQVYAKRSTAYYERLIKEYASDGGILKIYKKDGKITDIKIAAEAEEVDGGKPKIMIRIVDVRRMLMSLRLQSFMGTCFTVTDPIIEENNRCVMITGTEFSGVMLMDGKPENSEGTITVGALASLVFGVKTAEEICADGDAVMSERMKEELGKIIPLSRVYLNETVMRVGMGYDVHKLVEGRDLILGGVKIPYEKGLLGHSDADVLLHAIMDALLGAAALGDIGKHFPDTDPAYKGASSIRLLEEVGRMIDEKLYVIGNIDATIIAQRPKMAPHIEQMRKNVAEALHIEVDQVNIKATTEEGLGFTGTGEGISSQAIASLDTIANYSYRVGPSEGGCAGCGGCMKVQESMVPKSSLFIRIVAGAYVIYLGGKLINSSLADRPENYILYIAAGVIFALIGLYWLVGSGIKMVKKEYRDDSIRGRMNESENETEEVKATEENESEEPVEETEESATPENDKPVRMVYTARESEKNPVLFLCPIYLTKYTRKVKSFIIFYIAMRSKETAACRNCHCQFIADALADSTDMVRTGGMSYVDEVLEKVVAKNPAEPEFHQAVKEVLESLRVVVEANEEKFRKDALLERLVEPERQIKFRVPWVDDKGQVQVNTGYRVQFNSAIGPYKGGLRLHPSVNLGIIKFLGFEQIFKNSLTGLPIGGGKGGSDFDPKGKSDREVMAFCQSFMTELCKYIGADTDVPAGDIGTGAREIGYMFGQYKRIRGLYEGVLTGKGLSYGGSLARTEATGYGLLYFTEELLKINGKDIKGMTVAVSGAGNVAIYAIQKAQQLGAKVVTASDSTGWVYDPDGIDVAALKEIKEVKRARLTEYKNYRPNSEYHEGRGVWSVKVDLALPCATQNELHLEDAKQLVANGCVAVCEGANMPTTLEATQYLQENGVIFAPGKAANAGGVATSALEMSQNSERLSWTFEEVDAKLKNIMVNICHNMDDAAKRYGMEGNYVAGANIAGFEKVVDAMTAQGIVMSNVKRVYVEKKSGFDVQAKELKTEIRSYLGIKDVDSVRVLIRYDVENVSDETFEKACNGIFSEPPVDTLYKEEFPAEEGSRIFSVEFLPGQFDQRADSAVQCIQFIKEDEQPVIRTATTYVIHGGEGSLSDEEFEAIKEHCINPVDSREAQGEKPETLVTVFDEPADVKIFDGFKDMEENKLKELYDSLGLAMTFKDFQHIQNYFKSEEDRDPSMTEIRVLDTYWSDHCRHTTFSTELTDVSFGDGDYREPMEETYKQYIADHSEIFKGREDKFVCLMDLALMAMRKLKREGKLQDQEESDEINACSIVVPIEVDGVEEEWLVNFKNETHNHPTEIEPFGGAATCLGGAIRDPLSGRTYVYQAMRVTGAADPTVSVKDTLKGKLPQKKLVREAAHGYSSYGNQIGLATGAVKEIYHPNYVAKRMEIGAVLGAAPRRAVIRETSDPGDIIILLGGRTGRDGCGGATGSSKVHTEESIETCGAEVQKGNAPTERKIQRLFRREEVSKLIKKCNDFGAGGVSVAIGELADGLQIDLDKVPKKYAGLDGTEIAISESQERMAVVVDPKDVDEFMKYASEENLEATKVAVVTEDPRLVLSWRGKEIVNLSRAFLDTNGAHQETTVAVDIPNRKDSILVREEVKDVREKWLDMLKDLNVCSQKGLVEMFDGSIGAASVFMPHGGKYQKTETQAMVAKLPVLTGDCDTVSMMSYGFDPYLSTWSPYHGAIYAVTESIAKIVAAGGDYSKIRFTFQEYFRRMTEDPHRWSQPFAALLGAYSAQLGYGLPSIGGKDSMSGTFEDIDVPPTLVSFAVDIAKEKDIITPELKKAGDKLVWLRIETDNYDIPVYEKVMDQYGKFTEDIHSGKIVAAYALDRHGIAAAVSKMAFGNGMGVKIEHDVDARDLFAPAFGDIIAEVPADKVSELGITYTVIGEVTDSAAIEYNDVKIALDEAVSAWEETLEKVFPTNSGAEGQDAKVETGLYDTSDIYICDHKIAQPTVFIPVMPGTNCEYDSAKAFERAGAKVITKVFRNMSASDIVDSVEVFEKAIEQSQIIMFPGGFSAGDEPDGSAKFFATAFKNAKMKEAVEKLLNERDGLALGICNGFQALIKLGLVPNGEITGQQPDSPTLTYNTIGRHISKMVYTKVVTNKSPWLREAELGGVYTNPASHGEGRFVANKEWLDKLFANGQVATQYCDPEGNITMNEEWNVNGSYCAIEGITSPDGRVLGKMAHSERRNRSVAMNIYGEQDMKIFESGVKYFKMKKLTTLISVVAMMCAVIAALAFSIWAAVYGDSHYGFYKKEYQKYEVTEDLDMNIDHVMYVTEHMMNYLIGKEEKLSVVTTVEGKEQDFFNERDRLHMRDVRNLFLGGIKVGGVCLIVAAAILTMFKKREKDWKRLFCRAYSIALGVWLVIGVLLGIAFSIDFTTCFTIFHKLFFTNNLWIFNPETDYMIRMLPEGFFSDMVIRISEVFGAVLVVIWIVLFVIKKYYKKPEESMDINYELYKVFYYVASTLSFSEASKQLFISQSAVSQSIKALEKKLDQTLFIRSTKKVRLTTEGEILLRHIEPAISLIKRGESQLLDVGVRGGQLHIGASDTICRYFLVPYLERFHREFPGAHIKVTNATSIRCVELLETGQVDLIVVNSPNSYLGNVPNVKKIKDFQDVFIANEAFKELKGKKVSFKELLDYPILMLDRKSTTSEYLHNLFLQNQLDLVPEIELSSNDLLIDLARIGLGIAFIPDFCLSQTADSDSLFIVETKESLPERELVIAHNEKVPVSKSAQEFLSYFMNLEQPCIRISVRNLVEFILRYGDIDNRTGGADKEAMQQGGRIHRKIQRQQGAEYRAEVSLKYQIACDGFILSVEGRADGIIELPKRVVIDEIKGVFKDLKRLKEPQLLHLAQAKCYAYIYAEQKNLEEIGVQMTYCNLDTEEIRRFQEVYTRAELKKWFEELVSEYEKWARYQMEWRAKRNASIKTVEFPFEYRDGQKKLVASVYRTILRKKKLFIQAPTGVGKTMAAVFPAVKAVGEELGEKIFYLTAKTITRTVASQAFEILRKQDLKMKVITLTAKEKICFCEETICNPDACPYAKGHFDRVNAAVYELLTSTDEMSREVLEEQARKWNVCPFEMALDVSQWVDAVICDYNYVFDPNAHLKRFFGDGVKGEYLFLIDEAHNLVERGRTMYSTSICKEDFLKIKKLVKYGEPKLVSALESCNKQLLELKRECDGCQILNSVSHVYIKLLSLMTKLEEFIEDCKDEVIRKGVLEFYFGIRNFIYIHDRLDENYLIYSELSEEGKFYLHLFCVNPAGCLQEYMGKGNSTILFSATFLPINYYKKLLSAAKDDYAIYAESPFEQSKRLLLLGNDVSTKYTRRGPEMYRKYAEYMMRVIKGRTGNYLAFFPSYRFLEEVWEAFMELPQEQIEVAVQSQYMTEQEREEFLKKFEQERAHSLIGFCVMGGIFSEGIDLTEDKLIGAMIIGTGLPQVCLERELLKYYFDRKNLNGFDYAYLYPGMNKVLQSAGRVIRTDQDRGVIALLDERFMDRRCQEVFPREWNDFQICNSENIEEKIAGFWKEEQMDKRMDLRIEKTERGIKNAFIELRSRKPLEKITVKELCESARINKSTFYAHYKDIYDLSDAMEEEVVQSIANSIQHPEYLLEHPAEFARELLMAYISQNSLTAILFSGSQANHFADSIERSIKQMIFEKYPEFEEDTAMNVMLSFCIQGSYHAYQKNRSGDIMTVIDVIVGMTGAVRPMYEERLGESRSMDFYGFYTGKIFDAYEFLGAHPDKDGTTFRTFAPAASRITVIGEFNDWQEWELNKTYDGNFWECYAKGAKPGMMYKYRIYRQDGNCVEHCDPYGFGMELRPNFASIIRDLSHYKFKDSKWMQKRSVCKDKPLNIYELHFGSFKKPSEKADDWYTYVEMIDILIPYLKENDYNYIEIMPLSEHPCDESWGYQNTGFFSPTSRYGTAEELMKFIDACHKNDIGVIMDFVPVHFAVDHYALADYDGTSLYEYPHQDVGVSEWGSCNFMHSRGEVRSFLQSAANYWLSVYHVDGIRMDAISRIIYWQGEPARGVNNNAVDFIREMNRGLKTLHPTAMLSAEDSTSFEGVTKPADQGGLGFDYKWDMGWMNDTLDYFRTAPEYRSRDYHKLTFSMMYYYNDVFLLPLSHDEVVHGKATIAQKMHGEYEEKFPQARAFYMYMYAHPGKKLNFMGNEIGQLREWDEKREQDWDILKYPIHDAFHHFMQKLNHLYMTTPALSAKDYENAGFHWLDCHQKERCIYAFERTDGKERIAAVFNFSDEDQKGYELPVEDAKELEVILASDDETFGGCKKYTKKKVKVTDGKAVLDLSAYSAVYYSIAVMAVQGVTVEGETCTCHYIEKEKEQEVTAEYVLCAVGRCPNTDGLFGENVKPDMERGRVLVNENLESSIPGVYAIGDLIFGAQLAHAASAQGMVVAEKLAGKEPSIDLSIVPGCVYTDPEIASAGMTEDQAKEKGIAVKCGKFIMSANGKSIITQEERGFIKVVAEEEVNCYLVHQTGYADRNKGFLTFIPVRAAVAMYFPLIVDEALMVEPTETESKETLDDAIAVFRKLYELAGTDPEKARHMNRIEDVTNYITECDKEVGEALALELGRQRRNLELIASENIVSPAVMLAMGTVPTNKYAEGYPVSRQWISQKVCWTMVFIRLQCISHMAEEQKTGCSPSDCAGCSHAGECGSKPQSLIKPENKKSHINHVIAVVSGKGGVGKSMVTASLARLMREQGFSVGIMDADITGPSIPKMYGIHEKAKGDGENIFPCEAKDGTKIMSINLLLPEEDDPVIWRGPVISGVVTQFWTDVAWGELDYLFVDMPPGTGDVPLTVFQSLPVEGIVIVTSPQDLVRMIVKKAYNMAGQMDIPVLGIVENYSYLECPDCGRKISVFGESHIDEVAEELGVPVIGKMPIDASLAEAVENENFAEVSNDYLAEAVNKLMKIVATEKAPKALGPYSQGYVHNGVLYTAGQIAINPEVNDVEATTIEAQTEQVCKNLGEVLKEAGTSFDKVLKTTCFLADMSDFAAFNEVYGKYFTSKPARSCVAVKTLPKGVLCEVELIAAVEEMIVLSKEQIEEMVDPDQMMDQIEEAYRIYGSGEFYMPPRPTVEHENKQLMYMPCYTKDIIGTKILSIFPENSKLGLPSIDGIVLLNDYTTGAPLAVMDGQSVTAWRTGAVGGVGIRHLSRKDCRTVGIIGAGMQGFHQAVYACAARDIHTVYVFNHSDRDLTDYLERLKKAIDKEDVKVVQCKAVEELVRNSDIICTTTPSTTPVLPDDKELLRGKCIIAIGSYMPEMREIPDAVLDLVDNVYIELPYACEESGDLSQPLASGKLTKDRIKLMHEYLVSGEKEIKEGQTTYFKSVGMGLFDVCIAQKLYEVAKEKMEEKSKYTKTINWKQFYRNVFALVIPIAIQNLINVGVTATDVIMLGKVGEKVLSGASLAGQIQYIMTLIFYGVTSGATVLTAQYWGKKDTRTIEKVLGMGLSAGLIVAVVFAGAALGMPETLMRIYTSDPEVIAEGVKYLRIVGFSYVFMAVTQVYLNIMRSIERVMVATFIYLISLLMNIVVNAVLIFGLFGFPVMGVRGAAIGTLCARAAETVMVLVYAIFRNKVVRIRLKDMVKIDKVLLKDFAVYSMPVVLNELMWGLGTSANTAVIGHLGSAAVAANSVAQVARQLATVVTFGISHATAIYLGKTIGEGKMELAKAYGKRFVWLSLILGILGGVLILISAPIANANLALTGPAKNYLSFMFFVMSYFTVAQAFNTTMVVGVFRAGGDTKFGLIMDVSTMWGFSILLGAVAAFILHASVPVVYVILMSDELIKVPITLKRYLTYKWLRDVTREQKELEEMMKIVIVDDDILVSSALKTILEAGGEVEVTGTGQDGKDAVRLYDELLPDVLLMDIRMKDMNGLDAAEQILKRHTDAKILLLTTFSDDAYIVKALKYGVKGYLIKQDYGSILPALQAVQMNQTVFGTEIMSRIPGLLQKEQKEKEQTFDWNSYGIGERELEITALVAEGLSNKEISEKVCLSEGTVRNYISNVLEKLELRDRTQLAVYYLQRSRKCDKNKMRKITDEGCLFLYGAGLLVTAETGIPAVITILFACIYTCVNLVGEEKYLHYIMTIAFVAAGIVFKEMWMFLPVVLYNMLCFYSPVYIGVGGIIVACEAPAFREYYGLEKEMLIVAGLAAAVLLYGRTRRLNELEQKYKRVRDDSRELTLMLEKKNQDLLKKQDTEVYLATLKERNRIAREIHDNVGHMLSRSILMVGALKTVNQAENLKVPMEQLDQTLNEAMTNVRQSVHDLHDESVNLKEVMESLAEEFRFCPVQLTYDMRYDIPKEIKYSFIAITKEALNNVMRHSNANEVKILAREHPGLYQLIIEDNGTSDERIRPDGDWEEYAEKESAGKTENARKTENTESSGIGIENMKKRVRMLGGTMQIQKENGFRIFITVPKNEGKRMLVHIENLVKRYGDLLALDHLSLDIEEGEIFGLLGPNGSGKTTAINCLLALLKYDKGTITIFGKDMKPDSYDIKQDIGVVMQNVAVFEQMSVYENIDYFCGLYIRDKQKRKELVEEAIAFTGLSDFRKMRPKKLSGGLLRRLNIACGIVHKPRLIIMDEPTVAVDPQSRNKILEGILELNRQGSTIIYTSHYMEEVEQICTRIAIIDHGRVLASGTTEELKKMIKTGETITIEAVALTKNNLADIRSLSHVFDLSYQDQTMILRCSGAKHNLIRVLNYLQEQDIPFGRVFSELPTLNDVFLEITGKELRDMLHLLKYQFLQTIRSRSIMFWALAFPLILGTLFYVSFGNAGLAGTGETDWEPVPVAIVTVESSSANAASFLTFLNETDQDMIDIHSYKTEKAAKKALRREEISGIYYVKSVPSLTIASNGINQSILSSLLDSYEKNADMIRDIATQHPEKLSDALSSLNDYQTLVKEKSLGGHSLDPILTYFLALIAFACLSGVYLSIHSTVQLQANLSALGERRSITPTHKLSLILGDLLVLESIHFVNILILELYLTQVLHISLGHDIPKLLLITFMGTLIGICLGILIGCAGKLSYSVKSGIGVLVTLLPSFLAGLMFGGMKNVIEQHCPVINRINPASVLSDAFYCLSVYDNAVRYRRCILILVIMCLLCISFSFLMIRRERYDSIMTVFKGFLIITKRNLLMVFMYLAIFLTIGILASGSDSNTSGSGFHAQTLTVGVVDHDGGVLSKGLSTYLSQYHTVRQMPDDTAKLQDALFNRNVSYIVTIPEDFKTSCLREHQALPVSKIPGSTDGYYVDQQINTYLNQARVLTDNGYSDKEAAAYILKHADSSSHVTMLKSASSEKTPGYGYMYQYLPYVLISILCYVMGLIMIAFHQPDLQKRILCSAVSIRSQNLQLALGYLAVGCSVWMLTTWIPAFFFYRKAFFQSPKMPYYMLNSLTLLLVGLALSFLLGTFITKEDILTALVNVVTLGMSFLCGVFVPLDIMGKGVKTVAHFLPVYWYEISNNLLNNSAVLTQAQRQLLYRSYGIQLLFAAAIFCIALVVSKRMRQTAMEIHILDMIQNLRTPIGDVVVPLITRLGDAGIIWIILTVLLLIIPKTRKTGVIMMAALLADVLLCNVVIKNLVARTRPFDVNTAVQLLVAKPRDYSFPSGHTAASFASVTALYLAGEKKMWKAALVLAVLIALSRLYLYVHYPTDIIGGVVFGSLSGYLGYKIVEWIQKKKIKMKDLTKGKPSALILSFALPIFLGNLLQLTYSLVDTRIVGSFLGEDALAAVGATSTLSGLIIGFLLGLSNGFAIITAQKFGAKNIADMKKSFAMSLVIGTGISILFTIAGLLFLKSILHFLNVPKHLVPVAKGYIAIIIAGLLATFLYDACAATLRAIGDAVTPLIILAISVALNIVGDLFFVVVLKTGVKGAAIATVLAQIIAFVICWIYMIRKYEILRLQKEDFKDPSPIMVKEMISAGMSMGFMSSLVNIGTLTLQTAINKLGKDIIIAHTAARKITEIFMIMFSVFGQTMATYCGQNVGAGKIDRVKRGIWLAIVYTAIWSGLTIIASYTIGGWLVYLVTGSHNKTVILNATNYLKFDTLFYIVTTLICILRNAMQGLGDHITPLISSGLEMAGKIVIAATLVPWLGYTGVIICEPIVWFIMVIPLLIQTFRMPVLRTEKTDGKIMRTYKIRLLKCSGKDQKISAYLQLLTGLDKVMANRIVSNLPATLFDNLDEEGMEYFKEAFDFYEVEYEITPLEETCEVCGYPSRQVIVLGRIVEYYGQRNGFLQLAKKYNFETKEDLSMAPFLIRDGMDAEKAVKLQQELTNIGIRSQVIRSGSPVTERKRKKFFQRLLSSEVMIERDLDVMKNADYMIDMGPGDGDAGGTIVAAGTPEDIMASEQSITEKYLKTERGMIGMNFFYFEFGYSVGGSLVFWFTIMYGLGMLISEASFAWLSSKFTRNQIITAATIIKVIGYMLFMSVGYILPKSIVLLNIIGFLIFFSQGAFNMTIIVMLNNTIEYDEVRFHERHDSIISAVRSFATKLASAVDQAVVALILIISNIYAISQKNIIDERKYEELVAEIKSTNKKMACAFGMEACKHYYSVRYVRLPDLLLDLQAARDNGTFSTVLKKYTKPIVLIIDEWLLLKLTEAEARNLFELIHKRRRKSSTIFCFQFRESEWYQQICDGESTLADAIMDRISYDSYKIDIESVDPSKDLSMREVYGLNPAMEKMTNQSTIDKLIEMRLTAMADAFRIQMDDPAMKEVPFEDRFGMLVDVEYSNRKNNRLKRLSLNSQMPASQRLITILDESMTKYREILRLKSLGFSEKNIAQSCGVSRNTVAKVLKKAAEINLSWPLDFDMTDSALEELMFPKDKSATNKRMPNFDYIRKELLRNGVNKKLLWVEYCEECRMSSEEPLMYSQFCYYIQKDEEKRRATMHIPRKPGEQIEVDWAGDPAHIIDPDTGEITNAWIFVGVLTYSQYAFVKAYMNEKTDNWIKAHVQIFDFFGGVTPMLVSDNCTTAVNHKKSDWYNTALNTTYHEMAEHYNLAILPARVRKPKDKPNVEGSVGKISTWITAALRNEQFFSLAELNASIREKLDAYNARKFQKKECSRLSLFLGEEMPLLAPLPATPFELAEWKQATVQFNYHIAVDRMFYSVPYQYIKNKVDVRITDTTVEIFYNHNRIASHRRLYGRSGQYSTVTEHMPQEHQKYLEWNGDRFRKWADSIGINTSKVVDAILTSGRIEQQSYRSCMGLLKLAEKYSPEKLEQVCAKALSYSGKPSYKSIKNLLAATKDAPDTESESFQAVKPHGITRGARYYGGKKSMAHKCFISFKTEDMDYKKKIQEDMDIDMIDKSLDEPINSDDEDYIMRKIREDYLADSTVTIYLIGEYSAENSFLQDQTYIKRELQASLYNGENNTKNGILGIVLPSMYDKVYKGKEQCSVCGKNHNIVCINDNTTIKEFSYNYYIPKESGCSWSEDERYCVLVKWEDFKNDPETYIDNAFNKRKSEISKKTKVRPMSRKICFVAMGFGKKMDYRNSKEVDLDIIYKKVIKNLFDSLTEYELIRADEISGSEIIDVSMYSLLLKADLVIADITTMNENAIYELGIRHASKPFSTIIMMQESEKIPFDLNHCRILTYKDFGEVLDDEEAEKIKTNLHSFIKASEEQNIDSPLYTYLPNIVPPNISDRELDELLDTAKTKEETISNLVGKAEALKNESKFKESISEWKKLRDILPNNDYVVQQLALVQYKSKYPNATLALGEALNTIQSLNPKKSLDLETIGITGAIYKNLFKLNKNYDYLDEAINYYKKGFIIKNDYYNGENYSNCLLLKTQKPDLEVDEIEYLKFESKKVCREIISLLEENIRDNEINYWMYATLATCYLCLKDEKNYQKYEAEFLANTTIEWEIETYKNTIADTKKILMIEMPELKNYRLLISHSWKYSTQYDTILEWLNTASNFKWSNHSVSADNPFNTKTKTALKEQLTQQIRGCNAIIVVSGMYTLYSEWIDYEINEAIRMNKPIIAIKPWGNERVPLKIQNNATVLVGWNSASLISTIRNYALMVEDFMCNLKVYRVAQGLTQEQLAEKVGVRRETIMRLEKAQYNPSLKLAIDISRVLNAPIEDIFIFKMTKKQMKQVIFMGVGCVILLIAGIIYSLLFNDARWVKNMDMSNYVFSIKDIPMLIVGALIAIYVLYVTVIFFKNAFSKNFKDKNYSRTVSSYWGLCGIFGFLGFSGFWTYFEYGKIYPFVFFIFFGFFGFFFEGKLSHTLEDELFLENKRKAEINAYKVGFKLLFIVIWLMAIGMFSRNVEWCAIFMLISVSLIYALVIFLSNYLLYRYEKGEMEHYEKKISFLGENIQTIRKHRGMKQQELADKIGINMQSLSKIERGVNYPTFDTLEKIMDVLGVTPNELLSGEWKYVNQAEKEVCQFLRIEERLNAELKHGHYDNFFDSEEEWLEYELKKLREYITDYINGKSIVASDLYPIKEFIQHLKFQKLLDHYDDLYSMDMFGESIEGHKYRTPYQVVKMINPNSKEDMELLREVLKNNDFDDEDEMHILGLPTDIFNVYPASIKYKTYQARWQIGDIYVSGDARKTEDNPQGLGCYLVMTGRGCDDIFRILDSRNYTFGDMFRRCERRYGLDNFHFTRLDIAIDDKNEKPFFTIEQIKKKCEKEEFISNSEGYHFDESKFDDFDTAKTVYIGAGKSGLSYRFYDKDKEVCSKHNKTLEEVGSWKRTEMQLRDDKAHAFAMTFNDRPLELGELAFGLLANNLRFVVPNRNESNKSRWKTCRFWERFLGAVEVLKLQVPKQQNSLEETQQWLTEGGVISAVKSFYFLEEHDALGGLEKVGTMLDKARYSNSLSSKLTAHLQRINRTDLIPYIQYDTKHGKGGIMNNNDIPVWEKYTLTIEEASRYFRIGENKLRRLAEENKDAGWFIMNGNRIQIKRRQFEQVIDKLNAIMKEKRRDNKGRILHTGESQRTDGKYLYKYVDAFGNTKYVYAWRLTPTDPTPKGKREKPSLRELEQQIRRDVEDGIDSTGKKMTLCQLYAKQNAQRANVKKSTQKQREQLMRLLKEDKLGARSIDTIKPSDAKEWALRMKDKGFSYNTINNHKRSLKASFYIAIQDDCVRKNPFDFKLSEVLENDTKEKVALTEEQEQALLSFIKTDNVYHKHYDDVLILLKTGLRISELCGLTVADIDFKNEVVIIDHQLLKSKEQGYYIETPKTKSGIRQVPLSRETIQAFQRVMKKRPKAEPFVIDGRGNFLFVNHKGKPKVAIDYNALFVRMVKKYNKHHKDNPLPHITPHTLRHTFCTRLASKNMNPKDLQYIMGHSNISITMNWYAHASIDTAKSEVQRLIAMDKDPFKEYMKQSEPNKRDKGYAWHTAIGLQAVDGLKTSKYLIDTAIKNIEGDISIDEAQELLNTYYEENPKADIEDRTEEADKVAVRIAKILSEKAFSFTPNEYISIHKKLFTGIYGHAGKLRDYNITKKEWVLNGATILYGSASELRATLDYDFAEEKKFSYKNLSMEEIIHHLAFFVSRLWQIHVFGEGNTRTTAVFFIKYLRTLGFDATNDIFAENAWYFRNALVRANYNDLKNGVHETTEYLELFLRNLLLDEKNELHNRTMHISGRFAEVDIERVKVDIESTKVDIRNKLLSFSDTISEKTINHTVEIFSKCGKENCFGRTIVEEITGLKPSGASKLIKLLVDSEVIVPVTGHGKGKYRFQMENEKGIVKLTRKQLYDEIWALSVAGVARKYNLNYGKLIATCKVENISFPSSGYWTKKNMGKDVSNEIVEFSGLEDTEISLITKDAVVKRIRKAKAEVVEKVHTDVTEELDVAVEEDLSQKKTENIPKWPDGILDYLDATERNKVLEYACNLQISQSTRLHKMLVQYKKDIADYKSKLKEAQSRPYYNPRHNKPENEPAFFKEMSDECMSRAIAILDTVFKSIESLGGSINSDLSVRIRGDIVRFRMVESQDQVKHEMTKQEAQALVKYNDDIKNHRWASKPQIRKYDKVYNGKLRIVFGERSYIRDNDSEKLEDRLGDILVTLYEKAEENRIVREAREEAERKRVEEARRREENRQRKEQEIRLVKELVNKAEDYRIAKEIREYIQAMIDSGNEDITPAWIEWARKKADWYDPSIATEDEYLGKRQHEKNAEEKEKSLQDSIRKSWYWMPKYTDEDIRNMSKITCKIAADYLGISPMAVSIGMRNDLLPIGFAIHNEERDRTYSESWSYHIIGERLIAYKYGKTSEVQVQNIEKSLNTIIEQFEEMKKDLVFLLSENEDQQNMPMLPEEKARVKIDKQLRNAGWDIVTRNEYLPNSIDGTAIRIQFKISGLSKIKDILTEINEEGKHDRNDGFKTASKASQFDFLDMEFMTIKEAAEKWNLSVRRVQTICNEGMIEGAMKFGNTWAIPKNAVKPADKRIKSGKYIKSMKKGQVYEGIIESVEFPNKGRIYVPEEDRWVVVKNGVPGQKVRFSVNKIRKGKAEGRLLEVVEPSASEIPSACPHFGQCGGCTYQNLPYEEQLAMKNEQVKKMMDEAVNGEYIWEGIKPSPVRSEYRNKMEFSFGDEYKDGPLALGMHKRGSFHDIVNVTDCQIVDEDYRKILACTLECARESGLPYYHRMRHVGYFRHLLVRKAVKTGEILVDLVTASDTAELGVDPAEAMKKIQTFKEAWLEKMTAMNFDGTLVGILHTKNDSLADVVKDEGTEVLFGQDYFYEELLGLKFKITPFSFFQTNSLGAEVLYETAREYIGDTNEKVVFDLYSGTGTIAQILAPVAKKVVGVEIVEEAVEAAKENAKLNNLDNCTFWAGDVLKVIDELGEVPDLIMLDPPRDGVNPKALMKILNFGVERLVYIACKPTSLARDLEMIQGRGYKVEKISGVDLFPGTYHVETVCLLSKKCLVMEEQCYALLIDADNVSAKYIKPILTELSKYGIITYKRIYGDWTSTQHSSWKDELLTNSITPIQQFSYTQGKNSTDSAMIIDAMDILYTNDVDGFCIVSSDSDFTRLVSRLRESGKMVIGMGENKTPEPFRKACDKFTILENLMSEQNPGTTKNETSHDKRSKEKIEDAIIKMIIENQDINKPTGLGEVGSRLVSLYPDFDVRSYGYNMLSKFLEEFTRIQMVKHGNIVSVTLREDQDLKENIDSYVVQIVKKAGKAGVELSTLGNKMYEKYKDFKIRDYGYSQFNQYVKSLKHVRVEQEGTILKAVYKGMSKVEDIIAASKLSELMNKKEEDKHGKTVLWILALVGAVAAVAGIAYAVYCFFTPDYLEDFEDDFDDDDFDDDFFDDDDQVMSIYDTLNEQQREAVFHTEGPLLILAGAGSGKTRVLTHRIAYLIEEQQVNPWNILAITFTNKAAGEMRERVDKLVGYGSESIWVSTFHSMCVRILRRHIDLLGYDTNFTIYDSDDQKTLMREVCKLLQVDTKMFRERALLSEISKAKDELVTPQEYRMRAEGDYSRKKIAEVYEEYEKQLRSNNALDFDDLLFKTVQLFQTQKDVLEYYQERFRYIMVDEYQDTNTVQFELIHLLASKYRNLCVVGDDDQSIYKFRGANIKNILDFEHVFDDTKVIKLEQNYRSTGNILNAANAVIRNNHGRKEKTLWTENEDGNMIQFRQFDSAYEEAEYVVGDIRRHVNKELCSYKDNAVLYRTNAQSRMFEERFVRDSIPYKVIGGVNFYARREIKDLLAYLKTIDNGRDDLAVRRIVNVPKRGIGLTSINRVQEYASSRECSFYDALRAVDLIPNIGRGQAKLESFVAMIEHFKNDVQDMSVSELMEEVIKETGYIDALIHECESEEATSRIENIDELRNKIAAYEENCETQNEASTLSGFLEDVALVADIDSLDESTDYVVLMTLHSAKGLEFPHVYLAGMEDGLFPSYMTITADDPAELEEERRLCYVGITRAEKDLTLTCARKRMVHGETQYKKMSRFLKEIPLELLETGPSTKKEKKEESEPVRVKTSFMQAKEAFKTKAFTAPKPVQQFGTPKGGKLPYGVGDRVKHIKFGEGTVTAITEGGRDYEVTVDFDGPGTKKMFAAFARLQKVMRSIMLCYNLKGTKKGRKIGMLGSFLGFRVKYVEKEEYSKTIGVLTGLKEEVAEEASVEETSGTDNAKNEEMTDFEEEMIVMLLADNQTLDKLLFQMRKEKVQIPLKAIVTAKNQNWTSTALYKEVKREHESMTKAEQAGKKKEEMPGPGRQPRGMKSQVKNPGELFLRLMKYVLKDYKFHCISVVVLIVVSVLCNVQGTMFMKNLIDEYITPFLLSDNPNFTPLAHAIAKVAAFYALGVLATFGYNRLMVNVTQGTLRNLRNDLFSHMEKLPIKYFDTHAHGDIMSVYTNDIDTLRQMISQSMPQLLNSGITIVSVFISMLILSIPLTIVTMVMVGIMVFCSKKSAGQSGAYFAKQQKDLGTVNGYIEEMMNGQKVVKVFCHEEENMQNFKKLNDELYISADRANTFANFLGPINAQIGNISYVICAIVGGVLALGKVGGFTLGGLASFLTFNKSFSMPINQISMQMNAIVMAMAGADRIFRLMDEKEELDEGYVTLVNAKEEDGKLTECEERTERWAWKHTHQNDGSVDYVEVKGEVVFNGVDFGYNDEKIVLHGIKLYAKPGQKIAFVGSTGAGKTTITNLINRFYDIQDGKIRYDGININKIKKADLRRSLGIVLQDTHLFTGTVRDNIRFGKLDATDEEIVAAAKLANADSFIRRLPDGYDTMLTGDGANLSQGQRQLLAIARAAIADPPVLILDEATSSIDTRTERIVQDGMDKLMHGRTTFVIAHRLSTVRNSDCIMVLEQGRIIERGTHDELIEEKGRYYQLYTGNAISAMIKTLAKQIKEFKAASIATPLFMILEVLMEMIIPFLMASIIDKGVNAGDIQHIYKVGGIMVVAAAIGLFAGMMGGRYGAKASAGFARNLREAMFNNIQTFSFANIDKFSTAGLVTRMTTDVTNIQNAYQMILRMFTRAPASMICAMVMAFTINARLACIYLVAVIILGILLFLIMSHATKYFQQAFPKYDDLNESVQENVSAIRVVKAYVREEQETSKLRRASENIYNIFVKAETNLVFNAPMMQTAVYTCILLVSWFGAKMIASNSLTTGELMSLLTYCMNILMSLMMLSMVFVMITMSMASAKRISEVLNETSDLKNPEHPFMKVEDGSIEFRHVDFAYKKDSDEPVLEDIDLKIRSGETIGIIGGTGSAKTSLVNLISRLYDVTKGEVLVGGKNVKDYDMEVLRNQVSVVLQNNVLFSGTILDNLRWGDKEATLEECRHACELACADEFIDRFLKGYETYIEQGGSNVSGGQKQRLCIARALLKKPKVLILDDSTSAVDTATDAKIRRAFREEIPDTTKLIIAQRISSVQDADRIIVMEDGKVNGFGTHEELLEQNDIYREVYESQTSGGGDFDEKEEKMKEEDRKIGPEIHCTDLKLSRNLSAHVRKSGVDEVTMMHGWIIRYLYENREQDIFQKDIEQRFAVGRSTVTNLIQLMEKKGFVKRESVKQDARLKKVILTEKGIASQESFEDIVEHIEEELSEGISEEELHIFYKVLDRINQNVKKYEVRMTIDTKDMLNSILSSISRIDYVRPDDIPNIDLYMDQVTTFMEKELASSKRHEDDKILTKTMINNYAKNNLLPPPVKKKYSKEHLLVMIFIYYFKNFLSIKDIETMLTPITDKYFDTDKDFDITSIYKEVCELEKSRIPEFEKEIIRSYNTSKKSFVEVPEDDRDSLQLFAFICNLSFDIYVKKQIVEKLLDNFPDLLHSEKKNSNKKDLNKDTKKKKMSKKIRTEAVDYLFQGILSLEDKEECYTFFEDICTINELLSLSQRFEVAKMLREHKTYLEIAEKTGASTATISRVNRSLNYGNDGYDMVFERIGLGEAKEEKAEMAKAAADKGLKGLAITEHAPEMPGTCHLYYFQNLRIVPRKRFGIELLLGTELNIMNAEGKVDLSEDVLKTLDIAIASIHIPCFRDERTVENVTAAYENVMENPYVDIIGHPDDGRFPVDMKRLVSKAKKTGTLLEVNNSSLRPEGFRENTKENCLRMVKECKEQGVMIVLGSDSHVDADIAEYPYAEEILKKANFPEELIANLSLEKLKACIKYGKKLMARRRKMDPERKAFINSLLEHYQPKDAQDIQDMLKDLLGETLQGMLEAEMGAGKTTISDYLSTMFDMDIVEMDQVIAEREEMSISDIFATYGEEYFRDLETNLLIEMQSHKNAVISCGGGAALRERNVAEMKKNGRVVLLTATPETIYERVKDSNDRPVLNGRKNVKGISELMEQRREKYEAAADIVINTDDKTVLQICEELVQRLQESEEMFDKFFPDRYVASTYVIDFEGLYKEGVRGLIFDIDNTLVPHGAPADERARALFKRLKSIGFRCCLISNNQKPRVEMFNKDIQVDYVYNAHKPSIRNYLKAMEIMGTDRDSTVFIGDQLFTDVWGAKRAGIPNILVKPIHPKEEIQIVLKRYLEKIVLHFYKKSLQCEKKVEKMAKVSAGDIRNGVTIEVDGKVCQVIDFMHVKPGKGAAFVRVKMKNIIDGGVVETTFRPTETFEQAHIERKKMQYLYNDGEFYNYMDNETFEQIMISAEDAADSMKFVKENEEVTISFYQGNAFAIDPPLSVELVVTETEPGVKGNTATGATKPAIVETGAKVNVPLFVDQGETIKIDTRTGAYLSRAMTYYQFIHAVEEKIKKEVKEERKISVHTNIKNNGVKRTGIMISENGINISPTIYLEEYFQQFKRGYPLELIVKDILSLYEKIRFQNSWKEGEKVKSYDFVKGRIIYRLVNRERNRKLLEDVPYKEYLDLAIVYYVLLEMDEYGMASMLVRREHLKMWKVSEEDIYYRACKNTQKLLPYDFSTMRSVIMELLEIGREIEEQTGKMYILSNVMRSYGACAMMYPDLLRKIGEELEENYYILPSSVHETIIVAESEAPGKEELCEMIEEINETQVEEEEVLSNRAYYYECDTGKLLFMKAKIHEVLTRKNRYKRLVFILVLFSLVLLVGILGFGLTKEKEKKVQKTEQFVSSQKVVLVNGGCENMQTNPLKEETDEQMIKAVKDYYTEKKADTEFVEMYDHFKIYTKSGKYKDTYVAFVRYDMKIKDIYTEVPGLGTLYVKKDSQGNYQITQQVKKKEIREYINRIAEHEDVQALMNQTQESYQKAVGSDALLKEALDELKDAYENSIGNMKKIIDYIAEELADAFEKAGYDRAYGKVTLSNRPDLCEYQCNGAMAGAKAYKKAPFMIAEDVVALLKDSACMEEVEVVKPGFINIRLKKAFVADYLNQMEEAEDLGIQKAENPEMIVVDYGGPNVAKPLHVGHLRSAIIGESVKRIARKMGHEVLGDIHLGDWGYQMGLIITELKERKPELPYFDESFEGEYPKEAPFTISELEEIYPTASGKAKEDDAYRENALHATYLLQNGHRGYRAIWNHIINVSVSDLKRNYANLNVSFDLWKGESDAQAYIPDMIDKLKKDGFAHEDQGALVIDVQEETDTKEIPPCMIQKSDGASLYGTTDLATLVQRVEDYHPDKVIYVVDKRQELHFTQVFRSAKKTGIVPAETELKFLGFGTMNGKDGKPFKTREGGVMRLETLISETAEKMYKKISENHAIEEEEARKTANMIGVAALKYGDLSNQASKDYVFDVDRFISFEGNTGPYILYTIVRIKSILHKYQAQGNSLDGLKVQEAHADCEKALMLEAAKYNDVIANAFQDLAPHKICAYIYDLANAFNRFYHETKILGEENAEKQKSYIALLKVTKDVLEGCIDVLGFEAPERMMTEKLFYEDSHRTEFTAKVISCEEAKDGYRVVLDQTVFFPEGGGQYADTGVLGTVNVTDVHEKDDVIYHYTTEPLEVGSIVTGKINWEERFEKMQQHTGEHIVSGIVHERFGYNNVGFHLGADYCTMDFDGTISKEQLKEIEAAANEAVYQDLEIEILYPSKDELKDMDYRSKIEIEGQVRIVKIPGYDVCACCAPHVKTTGEIGAVKLVSMANYKGGERITMLCGRRAMRDYEKKDAMTKEISALLCAKEYEVADAVGKLKDEQTRMKSQIAELQQKLLEFRVAEIPVEEKIVTVFDSALSGNLPREMMNRLLDKGAVICAVFAGTDTDGYRYVIGSRSEDVRPISKALNVAFEGRGGGKPEMVQGSVKGTGKAMKELLMQYKMGRVEENKKKKKEALFRTAYELFTTKGINSTAISDIVEKAGVAKGTFYLYFKDKYDIKNKLIAHKTKELFDHAAIALEHSGITGLEDQLIFIIDDIINILVNNKPLLNFISKNLVMGALKSAFWAEDEGDKIFYERYLELVEADEHEYQDIDIMLFTILELAGSTGYNSILFEEPVSIEKYKPFLYRTVRLIIQSHRKMEAYTSFAEVYDTFMDNVPYEEWADYLEDRLKEYGVKDGLVLELGCGTGSMTELLAEKGYDMIGVDNSEDMLEIAMEKRIESGHDILYLLQNMQEFELYGTVRAIVSVCDCVNYVTEKNELQEVFRLVNNYLDPQGIFIFDFNTEYKYREVLGNQVIAEDRDECSFIWENYYNHTSMINEYELTLFVREDEEASLYRKYQESHFQKAYTLREMRGLLEKAGLKFVAAYDAYTKKAPMYTSERITVIAREYGKMKDYIVRATAAEGQVRAFAATTKELVETAREHHNTSPVATAALGRLLTAGAMMGSMMKNETDMLTLQVRGDGPLGGITVTADSKGDVKGYVNNPDVMLPPKNGKLDVGGAVGIGLLQVIKDMGLKEPYSGQTILVSSEIAEDLTYYFANSEQVPSSVGLGVLMEKDNTVECAGGFIIQMMPFAKEETISQIEENLKNITSVTDHLKKGETPEQILEILLGNLGLEITDTMPTKFYCNCSKERVEKAVISVGKKEIQDMIDEGKDIEVKCHFCNTAYKYTVDELKDILKRCKRMKDGFVKAAAATPDIRVADVAYNTENICKMIDETVANGAKVIVFPELCVTGYTCSDLFMQDILLKEAKEALFKIADYTKEKDALIFIGVPLAVDGELYNVAAALNRGNILGLTTKTFLPNYGEFYEMRQFRPGPDMARWITLDGKKIPFGPQLLFVAEQMEELVVSAEICEDVWSPIPPSTLAAREGATVIVNCSASDETIGKAAYRESLIEGQSARLICGYIYANAGEGESTTDLVFGGHNIIAENGTTLASSNRFSNEVIYTEIDVKRLLSERRKNTTFQTEKERTLIRIPFEIHVEETELTRRFASRPFVPSVMAERNLRCEEILTIQAMGLKKRLAHAHAKSAVVGISGGLDSTLALLVSAKAFDALGMDRSGIVAVTMPCFGTTDRTYQNACKMSVKLGATLREIPVGAAVEQHFKDIGHDPEDHSVTYENSQARERTQVLMDVANQTGGIVIGTGDMSELALGWATYNGDHMSMYGVNASVPKTLVRHLVHYYADTCEDQELKEVLYDVLDTPVSPELLPPKDGEIAQKTEDLVGPYELHDFFLYYLLRFSYEPSKIYRIARYAFEGEYDDATIYKWLYTFCRRFFIQQFKRSCLPDGPKVGTVALSPRGDWRMPSDACSEVWLRDLEKVNPEVYRSTGKSRLILMYFVFFFEQYYTSMLYLRQYKRTFSIMFLIIRRELNTMSEELLHEETQNEGTPVTMADLEEHFDDANPWNVVKSYMEKGTVLPVKVEGIVNGGAIAMVEGLRGFIPASRLSLSYIEDLETYLLKDIEVKVIDVDEANNRLVLSAREILQEKARKEREAKIAAVKVGSIVTGTVESLQNYGAFVDLGDGLSGLVHISQISLKRIKSPADVLNVGDEVTVKIIGIKDGKISLSMKALEEEKKEEEEIHVEIPKAEEIGTSLGDLFKGLKLDMAKKAGKIYVVGHKNPDTDSICSAIAYANLKREITGNDYIAKRAGQINEETHYVLQKFGVKVPNLLENVKLQVKDMDIHQIDGVGPNVSLKDTWTKMKENNIKTLPILRDEELLGVISTGDIATSYMDVYDNMILSKARTQYRNIMNTLDGEMVTGNEHGYFTKGKVAIGASSPELMQEFIEKDDLVILGNRVESQMCALDIDVSCMVVCQNAEVSEEVIKRADEQSTVIISTPHDTFTAARLINQSVPVKRFMTKTPLTCFHMSDYVEDIKEVMAKKKYRDFPIIDRHGKFKGFVSRRRFLNVSKKKVILVDHNEKNQAVDGIEEAEIVEIIDHHRLGNIETMGPVFFRNQPVGCTATIVYQMYKENDVEITPTIAGLLCSAIISDTLLFRSPTCTSLDEKVAKKLGKIAGINLEEQAQAMFKAGSSLAGKTAEDICFQDFKQFTVNDMVFGVGQLNSMSKEELQEVKEMLTPYLPEVLEKNGVQMVFFMLTDILDESTELLCCGAKAKEYIIDAFDLKEDSEKMILKGVVSRKKQLIPTLVSELQQMAKQIWKPGNMLYPLPAVMVSTADKSGKSNIITVAWTGTVCTNPAMLYISVRPERYSYDLLKDSGEFVVNLTTEKLKKATDWCGVRSGRDVDKWKEMHLTAGRASKLDYAPIIEECPVNIECKVTEIKELGSHHMFLAKVEAVQVGEEYLDEKGRLQLGKAGLLAYSHGEYLTLGDSLGTFGWSVRKASVSRKNKKNAEKKPVSKKNKKSTGKKAVPGKRKKMAGILLIYILGIYFLLTKMVQLEDEAVVGVKKTHKELSETTHSSNEKAIQYVESNMIKEAPKIAITFDDGPSPAWTPKLLDGLKERNVKATFFLIGENAENTPELVKRESEEGHLVGNHTYHHVEITRVPDETAKEEILMTNEVITGITGEEVSYMRPPFGAWQKKLEWELDVMPVMWTIDPLDWTTNNEDEIVNKVVTQAKENDIILLHDCYESSVNAALRIVDILQKEGFEFVTVDELIMNMDLFDYMREQNMEKEAPLASRLRPTTLEEVVGQQHIIGKDKLLYRAIKADKLSSVIFYGPPGTGKTTLAKVIANTTSAEFTQINATTAGKKDMEEVINKAKEMQGMYRKKTILFVDEIHRFNKGQQDYLLPFVEDGTIILIGATTENPYFEVNGALLSRSSIFELQPLAKEDIKTLITRAVYDTVKGMGSYQAVIDEDALEFLADISGGDARSALNAVELGILTTERSADGKIHITLDVASECIQKRVVKYDKTGDNHYDTISAFIKSMRGSDPDAAVYYLAKMLYAGEDIKFIARRIMICASEDVGNADPMALTVAVSASQAVERIGMPEAQIILSQAVTYVATAPKSNAACNAIFDAMASVKRTKTTVPSHLQDAHYKGAQKLGHGIGYKYAHNYPHHYVEQQYLPDEIVGEKFYVPSENGHEKEIKEWMRYIRENQMIRKIIHINEEKCNGCGACANACHEGAIQMVDGKARLMRDDFCDGLGDCLPACPTNAITFEEREADAYDDDAVKAHLAAKGPEALKKHLDAKKAHAHDNDAPAPHHGGCPGSMAREIQHTAPHGGCPGSMARSVEHTHNNDASASNNMSGSTPTAYSMESQLRQWPVQIKLAPLSAPYFQNANLLIAADCTAYAYGNFHNQFIKNHVVLIGCPKLDAVDYTEKLTEIIKHNDFKSLTIVRMEVPCCGGLEHAATEALKASGKFIPWQVVTIGIDGTIKDIMVSVVLQVLVYYKEEKECCWNNNKNKNNYNTAIKMSVMYLKMAQIYASKTNEIQKYETEHENEVRHLAGECMVLLENDGVLPFSDKIKKIALYGTGARHTVKGGTGSGDVNVRKTVSIARGLEEAGFEIVTEDWLDRYDRDLEEAQKTYLKKLKDMSDETGEPSVILGFKHPFQEPEQPIVEETDIKEADAAIYVLARNSGEGKDRRAEKGDYYLSDRELQNIRFMTENYSNCVVLLNTGGVIDLTELRKISGVQAILLTGQTGNMGGHAVADVLMAKTVPSGKLTDTWAKSYDDYPSSRTFSYRDDNLDDEYYSDGIYVGYRYFDTFGIMPLYCFGYGKGYTDFSLVTKEVTADEKLVKVEVEVTNIGKVYPGREVVQVYYSAPDGVMEKPTQELAGFAKTKLLMPGEKEVVTVTFATEDMASYDSYDAAWVMEEGEYTIRVGNSSRTTEVAAIIDLDETVQTVLLKNVMKDKEFVKEIHHMVPIFDLELDDTPFMRPILIYAENFKKKIMEYEVIRTMLEDKRPDEILTLEDVKKGAASLEELVAQLTVEEMADLCVGTERLEEGGNVIGSSSACVPGAAGDTTSALIEKRKIPNLILADGPAGLRLQTHFKTDKEGNKLPGGEQFGMEIAPFAKEQPEGAQDYYQYCTAIPIATTLAQSWDVDLIKRMGEIVGEEMEQFHIHLWLAPGMNIHRNPLCGRNFEYYSEDPLLTGLCAAADTKGVQSYKGHGTTIKHFAANNQEDNRMFTNAHISERALREIYLKGFEIAVKTAQPYAIMTSYNLINGTHAANHYDMLQNVARDEWGFEGFIMTDWYTSQDTTALGMVSESGKYSYSDGVQCIKAGNDLQMPGCRKNVEDIVDGVKNGRITKADLQRCAKHILGIALKTIMINHEEMSERKLKILHAIIQNYLETGEPVGSRTISKYTDLNLSSATIRNEMADLEEMGYIIQPHTSAGRIPSDKGYRLYVDMLMEEKEQELNEMQDQMLDKADKMDQLLKQAAKVLATNTNYATMVSTPMNNSNKIKFIQLSMVDEEQVIAVIVLGGNVIKNKIINIDEPISNENLLKLNMLLNTTLNGMSIEEINLGLIARLKEQAGIHSQVVGYVLDAVADAIHVDDDMQIYTSGATNIFKYPELSDNQSAQEIISAFEEKQQLSELVTQTLAQDENTGIQVYIGDETPVQTMRDCSVVTATYELGDGMKGTIGIIGPKRMDYEHVLKSMKRLQTELDQMFHKNDRKVEMENKQEKSQEDMVKEAVEEAKKSAAEAKEAETDTDETTETSEKVENEEAEETAKDTEKKSGKKLFGKKKDKKDEKIEELTDKLTRQMAEFDNFRKRTEKEKSQMYEVGAKDIIEKILPVVDNFERGLDAVKEEDKEDPFVQGMEKVYKHLLTTLEGIEVKPIEAVGQPFDPNFHNAVMHVEDENFGENIVAEEFQKGYTYRDSVVRHSMVKVANMGKIIGIDLGTTNSCVAVMEGGQPTVIANTEGARTTPSVVAFTKTGERLVGEPAKRQAVTNAERTISSIKREMGTDYKVTIEDKKYSPQEISAMILQKLKADAEGYLGEKVTEAVITVPAYFNDAQRQATKDAGKIAGLDVKRIINEPTAAALAYGLDNEKEQKIMVYDLGGGTFDVSVIEIGDGVIEVLSTAGNNRLGGDDFDQKITDYMIAEFKKQEGVDLSADKMALQRLKEAAEKAKKELSSATTTNINLPFITATAEGPKHFDMNLTRAKFDELTHDLVLKTSEPVQRALSDAGITASELGQVLLVGGSTRIPAVQEEVKRLTGKEPSKSLNPDECVALGASVQGGKLAGDTGAGDILLLDVTPLSLSIETMGGVATRLIERNTTIPTKKSQIFSTAADNQTAVDINVVQGERQFARDNKSLGQFRLDGIAPAPRGIPQIEVTFDIDANGIVNVSAKDLGTGKEQHITITAGSNMSDEDIDKAVKEAAEFEAQDKKRKEGIDAKNEADAMVFQTEKALQEVGDKLDGADKAAVEADCKALKELLEKANTDTLTDEQVAEIKAGKEKLTESAQKLFTKMYEQAGAAAGAQGAGPQPGANAGAGPAPEGFQGDDVVDGDYKEVMAESKRDYYEVLGVSKDADEATLKKAYRQVAKKYHPDMNPGDAEAEKKFKEASEAYAVLSDPEKRRQYDQFGHAAFDGSAGAGGGYGGFDFNGADFGDIFGDIFGDLFGGGRRGGRANQGPMKGMNIRKSVRITFEEAVFGCEKELDVVLKDPCPKCNGTGAKPGTSPETCPKCGGKGQVVYTQQSFFGTVQNVQTCPDCQGTGKIIKEKCPDCGGTGYVASKKKISVSIPAGIDNGQSVRIREKGEPGVNGGPRGDLLVEVVVSRHPIFQRQDMHIFSTVPITFAQAALGADIRIKTVDGEVIYTVKPGTKTDTKVRLKGKGVPSLRNAQVRGDHYVTLVVQTPEHLSAEAKEALRKFDELTGNSLGAEKSEKAEEHEHKGKKKKGFMDKLKETFDDMYAFDEIKKADSEIADAIQAEMERQNSHLELIASENWVSKAVMAAMGSPLTNKYAEGYPGKRYYGGCQCVDVVEDLARERAKKLFGCDYANVQPHSGAQANLAVFFAMLEPGDKVMGMNLDHGGHLTHGSPANISGKYFNVVSYGVNDEGVIDYDKVREIAVKEKPKMIIAGASAYARIIDFKKFREIADEVGAYLMVDMAHIAGLVAAGLHPSPIPYADVTTTTTHKTLRGPRGGLILCNQEAADKFNFNKAVFPGIQGGPLEHVIAGKAVCFKEALEPEFAEYQKQIIKNAQALSKGLMDRGVKIVSGGTDNHLMLIDLRGEDVTGKELEKRLDAAHITCNKNTVPNDPRSPFVTSGVRLGTPAVTTRGLKEDDMDMIAECIALVLQSEDNIEKVKGMVAELTAKYPLDMMFIPYRCMNANIYGRSQIFETEKRKSRKKIRNKNACRVACIWTYRRYAVGCSGRCTEHDVTVRGFVEQKYLDFSDETKKQIEANGEDKYQTAKETVKPEENQALYYTLTSVKEGSPSGEIRESMLEFASQFIGNPYVWGGTSLTDGADCSGFVQQIYKQYGYSLPRVAEDQSQYGTKIPVEDAQPGDLIFYAKEGYVYHVVMYAGDGRTIEAASTKLGIIEGKVNTKNAVWATRILKDDYSLTGDGIEKANATEDMYGQKLENFQITYYCPCEICYDKASKVTASGTPVAEGKTIATDPNVIPYGTKVIIGGHVFTAEDTGRKVQGNQISIYVNNHAEVSASDTENTDVYLAKMNQENLLNKIRQKDAKAFTHGGKFHADDIFSSALLLYLNPEIQITRGNQVPEEYDGIVFDIGRGAYDHHQKDSRVRENGIPYAAFGLLWEELGTEILGEELAEKFDESFVQPLDQNDNTGEKNELASLIGSFNPAWDAKGNHDDAFFHAVSMAGMILESKFERFRGNERADRKIEEILEAHDDAVEEGKCDERILILPEFVPCQKRLSETEIAFVIFPSNRGGYCIQPQKKEFSMNYKCAFPEAWLGLEGEALQKATGLSGAGFCHKGGFLMSTENLEDAVKACEISLKEYVEAPCIVCYGTCDEEVKELLHMLPEMKNVTVHKMPLSEPPEMETDGIYGEVLMEKQEWKKRIKEQVKEILKYKPEAVCVNGNVFSTYPVVHALRKKHVPVLTIIENDEEKLIVRIPSGSMGILSNIEPKEVFQYFEELSMVPRSTFHTKKISDFCVEFAKAHNLEYIQDEMNNVIIKKPGTAGYEDSDPVIIQGHLDMVATKTTDSDHDFENDPLDLFVDGDLIGAKNTTLGGDDGIAVAYAMAILASTDIPHPPIEAVFTVDEEIGMGGAHHLDTSVLKGKICLNIDSEIEGVMTVGCAGGYIYDTFIPIEWSEESGTKMTISLSNLQGGHSGAEIQKQLGNAHKIMGRVLYALAKDYDFNIVSTNGGNAANVIAQYNTTEIIADPAQAQDIIDAVAGLEQTIYAEFAGQEPTLSLKAVSDGETTLKAFDADTTSHVIGFLYGAIDGVQCYDRAFPTAVESSLNTGIVETTEDTVKIKFQVRSSVATKLDDMQNKLDLATDLASASREISGEYPAWSYNADSVIRPKAIELYKEMFGKEPTVETTHGGLECGILYGKKNDLDIISFGPDLTGVHTYNERVHIASTQRMWNYLKELLKACKMSTKEAKQMDQALFDFYGKPSIGQALPLAIQHVLAMIVGCVTPSIIVAGVAGLSQEDSVILIQAALVMSALTTLLQLFPFIKTKSFRIGSALPVMMGISFAYVPSMQAIAADFDIATILGAQIVGGVIALLVGLNIKRIRKFFPPLITGTVVFSIGLSLYPTAINYMAGGASSKSYGAWQNWLVALITLVIVTVLNHYGKGVWKLASILIGIIGGYIVALFFGMIDFSSVAQASFFQLPKPMHFGIKFEPSACVAIGILFAINAVQAIGDFSATTTGSMDRMPTDEELTGGIVGYGISNIICAFFGGLPTATYSQNVGIVSTTKVVSRVVMGMAAVILLAAGLIPKFSSLLTTIPYCVLGGATISVFASITMTGIKLITTEPMDFRNTTVVGLAVAVGMGVTQANASLAQFPEWVTTIFGKSPVVLATIVAIVLNLTLPRTQKKAEKMIKSYTNGEWKEPGSLCQAVGIYKEDFHKIVSVVGGGGKTTVIRAMLRECMENSDGRIPCAVSTTTHIQKTNAEYFLGEPSMKMFRKKLSDYEVVWMGREIRKGKLASFQKEFLEEVSREPVLLLLEADGAKHFPVKAPAEHEPVICEKTGIVLNVYGMRAIGRKIKDVCFRIGEVEKILGKTGEDILRPEDIMTLAVSRSAGRKCVTDEMEYQVILNQADTEEEKQTARQLAEDIGKKLSEKYISEKNTKDTEFSRQISKVHVTSDLIPLEERWMVDMSEIYKNKKKALVRGSGDLATGVGVALYRAGFQVIMTDIAVPLTVRREVAMSRAVYEGRAKVEGIEGILVRSYQEALAVLEENKIAVIVDPKAEICKEFHPDLLVDAILAKKNMGTRRTDAPYVIGLGPGFTAGKDVHAVIETMRGETLADIIYDGQPIPNTGVPGYVGGYALERLIRASGNGRMEPKAQIGDIVKKGQLLAVTGGKPVYSQLDGVIRGMLQEGVQVKKGLKIGDVDPRKDRKLCYLISDKANKIGSSVVRATEARLADKDYAMILLAAGKSSRYGSNKLLEELDGGRMFEHTLRKMRAFPLCIQVAVTRFEEIERAAEAQGMLVVENWEPDLGISHSLRLGLQKALEENPELKGAMFIVCDQPGLTAATFARMLDIGKKYPGKIVCAGRKGKMGNPVLWDRCFFDELSRLSGDKGGKQIIGAHMDDVLLCETEESELRDVDIPEQLTKWERDYGESGKSGEETMENQENQEKKHKRRVRYSGTHPRNYKEKYKELNPEKYADTISKVIKKGGTPAGMHISICVNEILDFFDIQPGQQGLDATLGYGGHTSKMLEKLQGEGHIYGLDVDPIESAKTKKRLEEKGFGPDILTVKLENFANIDKVAEEAGKFDFVLADLGVSSMQIDNPDRGFTFKAEGPLDLRMNPEKGISAAERLRDISKEELTGMLIENSDEPYAEEIAEAITEKIRKGGKIETTTGLHQVIEETLAFIPEKERKEAVRKSSQRVFQALRIDVNNEFEVLYDFLDKLPGVLKPGGKVAILTFHSGEDRLVKKSFKQWKKEGLYSEIAKDVIRPSKEECFRNSRAKCTKMRWAIRAEEMPYKEQLKRKQKQEEQLLGGFCKVSPIIGMEHPYFYRNKVHAVFDRDKKGNVISGIYAEGTHRVIAVEECLIEDKKSQEIIRTIRELLPSFKIKTYNEDTGYGLLRHVLVRRGFETGEIMVVLVLGSPILPSKNNFVKALRKVHPEITTVVLNVNNKQTSMVLGEKEKPIYGPGFIKDKLCGCTFRISPKSFYQVNPVQTEVLYNTAMDYAELTGKETVIDAYCGTGTIGLIAAKNAKKVIGVELNKDAVKDARINAKENGITNAEIYAGDAGRFMVDMASKNQKADVVFMDPPRAGSDEKFLSSVIKLGPKRVVYVSCNPETLARDLKYLTRHGYQAVKIQPVDNFPFCDHVETVVLLSQQKPDDTIEIDLDLDELDATSAELKATYQEIKDYVLKEFGLKVSSLYISQVKRKCGIEVGENYNLPKSENARVPQCPNEKEDAIKAALKYYAMIMGGTYTLGADGIYYPNLVSTDEEPHYGKYGMMRKTYLKEHRPAMYSMYMLEDRLTEHLNTVDDEAQERMDILVRMMERQGITEELKACDQMEWVRAVNNVRNAAEEIVLKELIYRNHMIFTQYHLLHNEMQKEVIHDWMNHFNPILNKYNTVKKKLKAKVTERKELNVKKEKASIFNPIQHIKLNQQLTTVTEEIEELKSRKEQLIFQAECSTDKDMTNLSKKYDQMNNNLDILDSQDISLQKQLEKDAAAFREEKFRPEPEQYTELLDTRLQIRPAFRDKLIEQLKGTFGKYYDYHRRDIAANDVDYLNVEDPDVFSHRAWELEYQRKQEIRRNQPARTKKRSYDMELRIIWVSASVDGCRLVIRIKENEDDFTDSSKISSDNNEEGKDIIADTDCTIVDIITRTGTPMVQRGTKVKKGAILVSGQIPICNDEKEITGYRLKNADADITGEKAITYQKELTRQYIQKKYYRSRFYFLQKRNYGIRLGRHYFTTESKNNQYPVFEKHVDQKKYQIANVIPVTLEKSTITPYRQMYKKYTKADARMILSADFQDYCKELEKKGVEIIQNDVKIYTGSETYYAKGTLKIRCSVGRKMPSVPIPIENSSEEETKNGDMGLMETVIDIPAEHEANVFGQFDVYAKKIERALHVTLIARGESVKIMGDALKVEKAKKVLDQLVELSKRGNTIQEQNVDYTLALVMEDSEENVLEIDKDIICHTLQGKPIKPKTLGQKKYVDAIRKQMIVFGLGPAGTGKTYLAMAMAITAFKNNEVGRIILTRPAIEAGEKLGFLPGDLQSKIDPYLRPLYDALYQIMGAESFMKNSEKGLIEVAPLAYMRGRTLDNAFIILDEAQNTTPAQMKMFLTRIGFGSKVVITGDATQKDLPSGQVSGLDVATRVVKDIEDISICHLTSKDVVRHPLVQRIVKAYEDYESKHENRRGNDAKYKGKDKRRRSMTLYFEEEGDVKLPLECEALAKRVVEEALDYVGCPYEAEVNLLLTENAQIHEMNKEFRGIDRATDVLSFPMIDYPEPGTFDFLEEQEDCFDPESGELTLGDIVISKEKVLAQAEEYGHSPMREYAFLIAHSVLHLTGYDHMEDEERQVMEQKQREIMERLDILRMSEQRKKNEKNFLVQGSILAIAGVITKLIGAFYRIPLLNIIGTEGNGYYSVAFSIYSVALMLTSYSLPLAVSKLVSARVAVGEYKNAHKIFRGAITFALLAGGFVALLVFFGADFIATTIMHLDMSAYALRVLAPCILIVALLGVLRGFFQGIGSMIPTAISQVIEQIINAVVSIAGAYVLLNAGKAVGKTRGDQSFGPAFAAAGGTLGTVLGAFSALVFVGLVFLAYNKVFKRKMRRDHSKKRESYKTVYKVLFVTIAPVILSATVYNISDFVDTALFNNVMAAQGFSKKEYASLLGIFQGQYSTMINVPLSISSALAASLVPSLVATVQTGSRKQVHNKINTVSRFNMVIAIPCAVGFITLAKPILNMLYFTQDNTTAALMLQMGALSVVFFCLSTVTNSVLQGLDDMMTPVKNAAISLVIHIVTLFLMLVVLKWNIYAVVLSKIIFSGAICVLNAKALRDRIGYVQEKKKTFVIPALASLIMGVIAVLVHLIFELFAGPYIATIIALLAAVVTYGVAIVVLGGITEEELLGMPKGATLVTLCRRLHLIKGEYRMRPVKKIALLHDICGVGKAAMMNMTPILSMMGIEACPIPTVLLSTHTGGYGTPAIYHVPGEYIRTCADHYKKENITFDAIFVGYLGNVDVIDSVIYFISQFPDTKVILDPIMGDHGKYYSNFDESYGTSIRRLLPYSDVILPNLTEMYLLAGKEYQITGNHRNVLHLCEELRKMGAKDIIITSVPKDDCKKGIVLYEDDAFLYIGNGEVLKEFHGAGDAFDGMFLARLLQGNTLLESVQASHAFVCACIRESEKYDYPEREGLLIEKTLRKIVMKNKYGIGFLMFLILVVFGITCAYQLSLNKGKREIQAEINAKEQKEMNNTSVAADGQALKDDCYYLKELNGYVVVYLSDKKTVYEYTDISLEDLPENLQKEIQNGKYIETSESLYGFLENYSSMDDKKVARINELYHKSKSEGLTPEELKEQQILRKEYIDSFKRNLRGQLNNISIKEKDGSITNLGEKFGSKKGNMEAKKEIRHKIIRLRKEMDPLVWQQATNDITERVINHPRFLEETDIYCYANYNGEVGTSSIMEEAWKLGKSVWFPRIEGNEMNFYLVESKDDLQPGAYGILEPTGDHIADGEDGLLIMPGVAFDEECHRIGYGGGFYDKYLEKHPNLHAVAIAFELQMYRELPFEEHDIKPEKVVTEKQSYPLDTEEKSLIMANGLPKDPMLLLSVVNTKLRDYYHNLDALCDDMNVEKEEIVNTLKTIDYEYDENRHQFVMLNNVNYDIDITKEPPADDTARQYYFIEKAKAYVQRESEELGRPLTFCVTTFGCQMNARDSEKLCGILEKIGYVEAAEDEADFIIFNTCTVRENANMRVYGRLGQLKPRKKKNPHMMIGLCGCMMQEPEVVEKLKTSYRYVDIIFGTHNIFKFAELIVTRFESQRMVIDIWKDTDKIVENLPNDRKFSFKSGVNIMFGCNNFCSYCIVPYVRGRERSRDPEAIISEIRQLVADGVVEVMLLGQNVNSYGKNLEHPITFAQLLERIEQIEGLERIRFMTSHPKDLSDELIEVMGKSKKICKHLHLPVQSGSSKILKKMNRHYTKEQYLELVEKIRRSVPDVSLTTDIIVGFPGETEEDFEETMDIVRKVRYDSAFTFIYSKRTGTPAAVMEDQVPEDVVKNRFDRLLKEVHSIASEVCSVHEGTVQTALIESVSEHDPSMVTGRLSNNLLVHIKGDKGMIGRLADVRLTECKGFYYLGELAEMKKISEYLFLWGIGGWIYYSLEIIFRGFSHWSMFVLGGICMMFFTYQGELVHWQDDFLRQVLRCSIFVTAMEFITGIIVNKWFALHVWDYSCMPFQLFGQICLPFMILFACLCAVGIYLSANILHLLYGEDKPQFVRKTILLNSKYKCYNEMMAELTPMMQQYMQTKKEYPDCILFYRLGDFYEMFFDDALTASKELEITLTGKNCGLEERAPMCGVPYHAVDGYLNRLVSKGYKVAICEQMEDPATAKGLVKRDVVRIVTPGTNLDTQALDETKNNYIMCIAYASDHYGVSVADVSTGEYMVTEIENSEKLFDEIYKFMPSELICNEAFYMSGMDFELLKEKLGITVYSLDSWYFDDAICERILKEHFHAGTIEGLGLADYDCGVIAAGALMQYLVETQKRDLSHISHLTIYAAGKYMLLDSSTRRNLELCETLRDKQKRGSLLWVLDKTKTAMGARTLRKYIEQPLIDKNAIEKRLDAVDELMKNAISREEIREYLSPVYDLERLVCKITYQSANPRDLIAFQTSLAMLPHIKCILSDMQTPLLKELYEELDTLEDLCKLVSDSIREDPPIAMKEGGIIKDGYNAEVDKLRNAKSDGKDWLAKLETDEREKTGIKNLRIKYNKVFGYYLEVTNSFKDLVPDYYTRKQTLANAERYIIPELKELEDTILGAEDKLYALEYQLYSEVRDTIGKEVVRIQKTAKAIAKLDAFASLALVAEQNNYVRPKMNDKGLIDIKDGRHPVVEKMISNDMFICNDTYLNDKKDRISIITGPNMAGKSTYMRQTALIVLMAQIGSFVPASSANIGVVDRIFTRVGASDDLASGQSTFMVEMTEVANILRNATSKSLLILDEIGRGTSTFDGLGIAWAVIEYISNSKLLGAKTLFATHYHELTELEGKIENVNNYCIAVKEKGDDIIFLRKIVKGGADKSYGIQVARLAGVPQSVTDRAKEIVEELVQADVTGRIKDIEVQGQESSKQKTKHFDEVDLAQMSLFDTVKDDDVIKEIKDLDLANLTPIDALNTLYQLQNKLKNRWMSKIQVLDPITIDKIAAGEVIERPASVVKELVENAIDAGATAIVVEIKEGGISFMRITDNGCGIERDDVRSAFLRHSTSKIRSVDDLVHIGSLGFRGEALSSISAVAQVELITKTRDQTFGTLYRIAGGKEEDLEDTGAPDGTTFIIRQLFYNTPARRKFLKTPMTEASHVGDLMTRLALSHPHISFQFINNGQSKLHTSGNGKLKDVIYHIYGRDIAANLLKAEYDAKGLKVTGFLGKPIISRGNRNFENYYVNGRYAKNNIISRAIEDAYKDFTMQHKYPFVVLHIEIDGEHVDVNVHPTKMELRFNNQQEVYNAIYSAVDQGLHEKELIPHVEMPEPKPVVSNTPTYAPKSKTGSVSQTPAAVQTGATSGMTGGVTSASMPQQKKAIVPPPQERDLEYFMSRMKERVLAEHEEKKRKEKIATKQAVHTTENIAENILVKESPSFSSASTPSNVAEEKTPYMQNASSKSKITMSTNTDETTKPESSLTETPKQMELFEDHLLTREAMQKYKVVGQVFETYWLVEYDNSLYIIDQHAAHERVLYEKTLKSMKTREFTSQMISPPIVLNLSMQEAELLNTYMDQFTRIGFEIEEFGQDSYAVRAVPDNLFSIAKKELLIQMLDSLSDEITRNQSPDLIDEKIASMSCKAAVKGNMKLSVQEVDALIGELLSLDNPYHCPHGRPTIIAMTKRELEKKFKRIVMKKKPLVVLTGPTAVGKTKASIGLAKAIGGEIISADSMQVYEYMDIGSAKIRPEEMQGIPHYLVDELKPWDEFHVVRFQQMAKKAMEQIYANGHIPIIVGGTGFYIQALLYDIDFTSTSQDDNYRQDLENLAKEKGAEYLHNMLREIDPKSAEDIHANNIKRVIRALEYYHQTGQKMSRHNEEERQKESPYEFVYFVLNAPREQLYQRIDRRVDQMMSEGLVEEVKRLKEMGCTKEMVSMQGLGYKEILAYLDGEYALDEAVYTIKRDTRHFAKRQLTWFRRERQVTWIQKEKYDYDEEKILEAMISHLEGKICMLKKKLRGKSKFLRKMNELMEIYSRNQDTAFAYRELLGLEPLIKYEGERAMFDLNRASLLYDMERYREAENVLRRIPSINPTFDAMCESLRFKILDAKMIPMNTIYNEMGIRETVLSFGKNIEKNLKDRFEKIDEIAEYNQLKVIKAMQDNRVSAGCFNYASGYGYDDQGRDTLEKVYASIFHTESALVRPQITCGTHALSLALAANLRPGDELLAPAGKPYDTLEEVIGIRPSNGSLAEYGISYSQVDLLADGTFDYENIKKAINDKTKMVAIQRSKGYQTRPSFSVKQIGELITFVKGIKPDLVCMVDNCYGEFVETIEPSDVGADMTVGSLIKNPGGGLAPIGGYIAGREDLIDACGYRLTSPGLGREVGASLGVMKDFYQGLFLAPTVSASALKGAIFAANIYEKLGFPVIPNGTESRHDIIQAVEFGIPEGVIEFCKGIQAAAPVDSYVTPEPWPMPGYDSDVIMAAGAFVQGSSIELSADGPIKPPYAVYFQGGLTWPHAKLGILMSLEYLVRAGIVTLMKKIAVIGGGASGLVAAIAAARSNPKVQITIYEQKDSVGKKILATGNGRCNLTNKDMKSSYYRSENIPFVEEVLEQFGYEDTIRFFSSLGLMVKERGNYVYPHSDQASTVLELLKLELHRLGIKILTGVQVTDITPISSGFMIKLNTGKQKADAVILACGGKASSKLGSDGSGYTLAKGLGHTMVPVVPALVQLKVRKNPFAKAAGVRTDASVTAICDGKAIASDRGELQLTAYGISGIPVFQISRYVAKALYLKQNAKVKIDFLPEMSENEFLSFLLERKEGREQMTCADYLLGIFHQKLIPRFLEQARIRMHTLVQELSETQFKSLVQAVKQNVVLIDTTNGFDNAQVCAGGISTIELSARTMESRYIKGLYLTGELLDADGICGGYNLQWAWATGYLAGKAAADTQMIRINQLKLNIAHTQSDLERKILKTLHMKKEYLQGYKIRRQSIDARKKPDLYYVYSVDVLVKDEAKIKKSIKSNQIQFQAKEDTYNFPANGTREFKHRPVIIGTGPAGLFCGYMLAIHGYRPILLERGADVDQRTKDVETFWKTGTLDPSSNVQFGEGGAGTFSDGKLNTLVKDKSGRNHEVLRIFARHGAPEAITYQSKPHIGTDILSRVVKEMRECICAHGGEVRFHSQVTDIQTVTTGNTKVLRKLEVYDLKKQEKYVLDTELAVFAIGHSARDTFAMLHQHEVPMQPKAFAVGVRMEHPQEMINKDQYGEYYPDFLPAAPYKLTANLKSGRGVYTFCMCPGGYVVNASSEPHRLAVNGMSYSKRDGQNANTAVIVTVTPEDFGSSHPLAGVEFQRKLEENAYREGNGKVPVQLFGDFCKNIPSQKLGNIIPQIKGMYQLANVRRIFPEIIADSLQEGVCIFDQKLPGYARKDAVISGVESRTSSPVRIIRDDSLQSEIRGIYPCGEGAGYAGGITSAAMDGIKIAEMIAGTYRPLETKKMKGAGSKNAWALFLLILAGVVLGGFIGTLAKGVPALSWLSYGQSFGIDEPIVLDLGVLVITFGLSIKITMASIIGVILSIIIYRFLMPKDERPYEKCARLGADSLSDVELLAVLLRTGTQGENAVDLARRVLYHAGENGILGIHQFNVERLKKIKGIGQVKAIQISCISELAKRLSKASYEETVCFTEPKTIAQYYMEDLRHEKQEHMKLLMLNSKAKLLGETNISKGTVNASLITPRELFIEALQKNAVSIIILHNHPSGDPTPSREDMLTTKRILDAGALIGIDLLDHIIIGNNCYMSFREEGMLMARNVYGLDLGSYDIKVYDKKKDTIWKEKNVIAFKDNRDRDIFAVGDDAFSMYGKAPSNIEITFPMEAGVISRFNDMQFLLQNLLKRGRQFSRGSEYVIAVPTDVTEVEKKAFFDLVIHSTAKAKEVNIVERSIADAVGLNLDIQNTKGIMIANFGGETTELSVLAGGGMVLNRLVKVGGLTFDQGIINLVKHSHDFLIGRQTAEVLRRNFNVFTGDSDSILSVAGRDLITGVPMRKPISIMLVRAAMKDPLLECVKAIHSLLDRTPPEVRKAIYENGIFLTGGLANMPGLEIYIEQMVGIKSRTALEPDTCAVNGLKRIIMSKDLRKLTFSMIEDNYRWMRMKTKNQSSLPSKYWLIIVIVICVILMGVERITGGNGPISFIANYTVIPMQKGIGYVGRYMSDLSDNFETLQDMKKENKKLQSKVDDLTIDNTRLRQDQYELERLRELYKLDENYSDYKKIGAHVISNSGSNWFSDFTIDKGSKDGIKKNCNVLAGSGLVGIVTEVGPHYARVRSIIDDESNISAMLLSTSDTCVVRGDLKQMENGRIRFEKLANNDNKIEVGEQVVTSHVSDMVKVSGLSQEKIKTQASMQKQQVEKSFQAVQKARAVQRARKSAQASAESGKAVLQVTGKSSKLSVQGITAAIQKGVVALEKMGKWIAGVTYRKIKERKSRQEEAMVQGAESGKKLIKLKPEQAALAKENGKRQVKAAPRVVKVSGLSQEKIKTQASMQKQGLHFRAFYLLTFAASHDLKETIDKDYCECGMLLETVRESEAPLKERSERVMSSKKKTPIHLEDLTPDEKVKYEIAEELGLLDRVMQDGWKSLTSKETGRIGGLITKKKRENEKNDKSITNVNMNEKINVLDVNIDSCTAKEAMKETIAFLESGPVSVIDVVSVDGLMQMNDLSELKARMNEFDLVLPGEKLILEAAEEARLPKEIDIKLYLKMFMRYLHKNHKRMYLLVESEEDGQEAFRYMQRTYSGIQLVGLAKVSAEGRADDMLVNAINGSEVDCILSALSVPLQEDFIAKNRNLLDARVWVGVGNRMFSDHRQGLGHGKLAKFLLNHIFKREMEKNKLKTKSMISNQILQNTIEGLKGITRIDFCVMDTDGKSLASTFSEQENYVEEVISFVESPADSQVVQGYQFFKIFDEHQLEYILLANGGSDDVYMVGKIAAFQIQNLLVAYKERFDKDNFIKNLLLDNLLLVDIYNRAKKLHIDTEVRRVIFIIETKHEKDTNALDNVRNLLGNRTRDFVTAVDEKNIIVVKELEPNDGHTELEKIAENMYTLLKEDGEEDVLIAYGTVVNDIKEVSKSYKEAKLALDVGKIFFSERSVIAYSALGIGRLIYQLPIPLCKMFIREIFEGKSPDDFDEETLTTINKFFENNLNVSETSRQLYIHRNTLVYRLDKLQKSTGLDLRVFEDAITFKIALMVVKYMKYMESLEYMIELREVTKEYSKGVAALNGINLKIEQGEFVFIVGDSGSGKSTLIKLIMKELEPTSGTIIVNGNNLSRMKHRKVAMYRRNIGVVFQDFRLLKDRNIYENIAFAQRVTETPTRIIKKKVPAALSLVGLAQKYKAFPKELSGGEQQRVAIARAIVNEPAILLADEPTGNLDPTNSWEIMKLLEEANDRGTTVLVVTHNQEIVNEMQKRVVTMKKGVIVSDEKKGGYKHENMKQGVKNIRRNKMFSVASIATMAACIFLFGLFYSIVVNFSYIVEKAEEGVAITVFFNEDTTKEQKDTIGAQLKKEDGVLKVNYVSADAAWNKFKDQYFGESSDLAEGFKSDNPLANSDNYEVYLSDVSKQKDVVSYAKSLDGVRKVNKSDVVAKTLTSVNKLVGYVSVAIIAILLAVSIFLISNTVTMGITVRREEIAIMKYIGAKDGFVRAPFVIEGLIIGAVGAVIPLVLLYFMYDKAITYIMTKFSLLNNIVDFLPVATVYRTLLPIGIALGVGIGFVGSFFTIRKHLKVMIKRKKMISLLLVLTLVSGMFVQTYATEIDDTKKKAEELESKKKAAENEKTSLADQLKKLTGEMEETKKKISAKEDEITNKEEELILAKADENEQYESMKKRIRYMYENGNTGFVEILCSSKSIGELLNNAEYISRISGYDRNMLVEFQKVVTNVENQEAELKKEYKELQTMQDNLITKQDSVNELIKNKQSEIQSLTSELGDTKNKLAQLEAAAAEAERKQKEAAAAAAAAKKAQAAAKKNTSSSGSSAGSAGASVVSGNGTFTHPCPGGYISSGFGYRTQPIAGASTNHKGIDFAAATGTPIYAAAAGTVISAGYAGNAGNLLVISHGNGLLTYYMHCNAIYVSAGQKVSRGQNVAAVGTTGNSTGPHLHFQVMLNGTPVNPANYLMKNRKSFLKGALCGALAMLLVAGLVSCGLKVNNGNSDITSKTEDKISELQNLIEKHYMGDVKEKNLEDGVYKGYINGLNDPYSVYYNKKETKELYESTGGEYSGIGAVMSQNTETGVITLVQIYKDSPAEKAGLKANDILYKVEGKEVTGKDLSKVVSKVKGEKGTTVELTVLRGEDAKEVTVTATRDTVQAQTIEYKMMDDKIGYIRVSEFDTVTYDQYKEALDDLEKQGMTGLVVDLRNNPGGSLSTVCDMLDLMLPKGLIVYTEDKNGKKTEMKSDEEHQFTKPLAVLVNGNSASASEIYSGAIQDYGIGKIVGTQTYGKGVVQQIFDLDDGTAVKLTIAEYFTPKGRSINGKGITPDVKVEYENNEENPDADNQLDKAVEEVKAQMKMINQLVANIKKTGAPIVVGLDPMLNYIPEQVQKKAFAEYGETLEGAAEAIWQFNKEIVDKTYDLIPAVKPQIAMYEQFGLPGLAAFKKTVDYCKEKGLVVIGDIKRGDIGSTSAAYAVGHIGKVKVGSKTYAPFDEDFVTVNPYLGSDGVNPFLDVCKEEKKGIFVLVKTSNPSSGEFQDQKINGRPLYELVGEKVAAWGSEVMGDEYSYVGAVVGATYPEMGKVLRKVMPKAYILVPGYGAQGGKGKDLVHFFNEDGLGAIVNSSRGIIAAYKQEQYAKFGAENFGDASRAAVETMIADIKGALENRMERKKEQAKVLSQEMLADGIYSLWIETETALTARPGQFVSVYTTDASKLLPRPISICEIDKEAKRLRLVYRVTGEKTGTKQFSELKAGDFVPVIGPLGNGFPYEKAEGKKVFLMGGGIGVPPILELAKQMQCEEKQIVVGYRDAHTFLKEEFEQNGTLYISTEDGSVGTKGNVMDAIREQSLDADIIFACGPTPMLRAIKAYAEEKKIECYISLEERMACGIGACLACVCKTKEKDAHSNVNNKRICKDGPVFLSTEVDLMDMKVNIAGVEWKNPVTVASGTFGSGEEFSEFVDLNRLGAVTTKGVANVPWPGNPTPRVAEVYGGMMNAIGLQNPGIDLFCKRDIPFLKKYDTKIIVNVCGHAPEEYLAVVERLADEPIDMMEINISCPNVNAGFLAFGQDAKHVEELTAQIKKIAKQPIIMKLTPNVTDITEIAKAAEAGGADALSLINTLTGMKIDINRRTFAVANKTGGVSGPVVHPIAVRMVYQTAQAVNIPIIGMGGIATPEDAIEMILAGASAVSVGTANFYNPNATIEIIDGIEAYMKKNGFESVKDMVGIVKMKKSFQIFKRDLGRLFRNRAAVLILVGISVLPSLYAWFNIAANMDPYGNTKGIQVAIANEDKGADSEQMSLDAGQNIVDNLKKNDQLGWKFVDAKEAKKGVRSGKYYAAIVIPDNFSESLLSILSGDIKQPKLDYYINEKKNAIAPKITDTGASTIQHEINDTFTSVAAESISELLSKEAGELSGKVSEGNSSLIKAIADTRKNLDEYNKVLENFQKTVDKSDEIMASAVSTLDQVTVTAESGAKAIEDSGNVLADTRTAVGQFSTEFSNGLSNGETLLNDTYVSASAKLGVFETKAGQALTAVDNSLSTASSLLDKNQELLEQLKELNDKIQGHTELGQQISAVIGQKITELENQNASLQELVSSLKTGNQGIQNAVTTAKNTRTSLEKLAKESKDSLQNYRTNLDQKILPQLNQSLDSMASLSGNLSAALTGVEPTVEQLKTILNQLNDSLKSSASALGQTGDVLTQVDEALASVQTDLNALQSSEMYQKLTSLEGLDADSIADFMSSPVSIKSNVLYDVENYGSGMTPFYTNLALWVGGLILVSILKQEVDKDEKVRKFTAGQAYFGRWLLFVAVGLVQGLIVCVGDILLLKVQCVHPVAFVCVGVFCSFVYVNLIYALALTFKHIGKALGVVLVILQIPGSAGTYPIEMTPAFFQRLHPLLPFTYGISAMRECIAGMYGANIWKYLGILAIFFPISLFIGLVLRPLLMNLNHLFDKRLSETELMLGETESAERKRPELTMMMKTLMEDAEWKQEFLVKSEKFEKRYPKMIRWGFLGMIIIPLVFLILMFSLESKLVFLILWIVSLIGLAVYLIVVEYLHDKMQRQLAMTGMTTEDLIHEIKEERGEMKNIWEIFRRDIKRIKNNVIAMIVIMGITVVPCLYAWFNIAASWDPYGNTGNLKVAVASVDEGYEGSLIPLQINMGDQVLTSLRSNSQLDWVFTGRKKAIDGVKSGKYYAAIVIPKDFSSNMMSIFSENIQKPSITYYSNAKENAIAPKVTDKGASAIQRQVNEVFVETISDTVITAFKAVTNVADQDGVAAIAQNLADNLNQIGSDLSAASSTLSSFSGMTTSAQQLLDTTGSFLKETQEHSKNTTDSLKKVKKSFSGIDETISGATDGVNAAINSGKEFYDQMSEIIDSAFSSNSQSADDVAGTLNTLASRVQKVIDSYTSLKSAIDEINVGNNAQLNALKGSISGKLGETIATQTELRDKLKSTASSLQGAADTAVTDKAELDKLVKSSADSLAGIKTDFEKNVKSSLDELGDSMGDTSSNLNLLMDRLDEGVDGVYDLSTSASADLTQINTALNHSCNLLNTAAEKISNTTGKIGEMQQSGDFSQLEELISGDSNVIGEFLAAPVSLKTNQVYKIENYGSSMAPFYSTLSIWIGGIVLVAMLKTGVSSKCTEGLKKVKPHQEYLGRYLLFLIVGLLQSTLICLGDLLYLGIQCKHPFLFMLAGWFSSIVYVNIIYTLTVSFGDIGKAVSVVLLVMQVAGSGGTFPIEVAPAFFKAVYPLLPFVHSMAALRETIGGMYGMTYWTELGKLGIFLILSLILGLLLRKPVIRMNEAFAEKLEETKIMMESYKQEFIEFMVESDVLKFGEFTLKSGRKSPFFMNAGAYVTGSQLKKLGQYYAKAIHDTYGDDFDVLFGPAYKGIPLGVVTAIAYSDLYGKEVRYCSDRKEEKDHGADKGSFLGSKLKDGDRVIMIEDVTTSGKSMEETVPKVKGAADVTIVGLMVSLNRMEVGKGGEKCALDEIKDLYGFDTAAIVTMEEVVECLYNKECNGKVVIDDTLKAAIDAYYEQYGAKMNEKAYKAMGLAGAAGIAVGIVVTVVGIAAGVISIISGARLLKEKKGILFMDSKKRKRIRILGKILFILYVIFIIYFLLFSDWYGRTGEMREYHYNLVLFKEIKRFWQYREQVGFFAMFTNLFGNVLIFVPFGFFLPMGSRQRSFFGTAFYSFGLSLCVEVFQFITKVGSFDVDDLLLNTIGGICGYILFVICAAIRRRHAGKKTKNRRMLGKKLRTEDDRIKAAAKARKKKRKKMIKTKYGQKAVRHSKRGVYSCTYAVVIAFLVSVMILFSFMNKGNVNILMGFFGLGTCAMAVIGIWLGIKGFREREKIYTTCKVGITVNAVFLVAMVALFVRGLMMIEERYELALDRIRLMQTEDTVGEPYKDYFKKMAEFVLMLDELRTELLDGRYQKLELDELRKWNRRLYQDVLPGQYEKSYANPDYACKMLGKESGQILGMLYAELRGAVVYVFEGKTEYLAILYELLIEVYNQFEEEPDPKAVRDTFYWYASDYCDVFLADRIREQVLPEESFATDLIMNSDLTDLRYLYQFGEYISENEWKTAEHLNSLPEETIRKMADVYTEGYRIGFVNTGKDLSKKSVVNIRYILGFERVVKKAIENFEKMGLKPVIYRAAVSVLTKRQHIKIGYYGAVANKQYEYDHKDDQALFMDKKYLERKLEVMQTTYEHHKKEAAGFAGPACIDMFGEEPFEPEAKETVAKLSKSQEEMILQYDSRQSQMVNQYIKGEERSFTIIAYPVPEIGEKYEEIFDEIIRINTLDAKLYEKVQQTLIDALDQGEYVHILGTNGNRTDLNVQLHPLNDPKKETIFENCVADVNIPVGEVFTSPVLEGTNGVLHVSKVYLNELQYRDLEITFSNGMVSEYNCANFERELENKAYIHDNVLYKHPTLPLGEFAIGTNTTAYVTAKKYGIEDKMPILIAEKMGPHFAVGDTCYSWCEDIKVYNPNGKEIIARDNSVSIRRKEDVSKAYFHCHTDITIPYEELGSITVITKDKKEITLLKNGKFVLPGTEILNEPLKNSNKMPKVGIIMGSDSDLKVMSKAAVMLEELGIEYEMTIISAHREPDELIEWTRGAEDRGIKVMIAGAGMAAALPGMCAALFALPVIGVPLSGKNLDGMDAVFSIMQMPPGVPVATVAIDGAKNAAILAAKILAASDEELLNKLKAYTAEQKEAVKAKAAKLDSIGYEAYLASKMDYKKAGVDIEAGYKSVELMKEHVKKTMRPEVLGGLGGFSGAFSLAKIKEMEEPVLLSGTDGCGTKVKLAMIMDKHDTIGIDAVAMCVNDIACAGGEPLFFLDYIACGKNYPEKIASIVKGVAEGCLQSEAALIGGETAEHPGLMPEDEYDLAGFAVGVCDKKDMITGEDLKAGDVLIGMASTGVHSNGFSLVRKVFEMTKESLDTYYDDLGTTLGEALLAPTRIYVKALKSVKNAGVKVKACSHITGGGFYENIPRMLKDGVRAVVEKDSYPIPPIFTKLAKEGNVDEYAMYNTYNMGIGMIVAVDPADVDKTMEAIKATGDTPYVIGHIEDGEKGVTLCMLNVVVLVSGGGTNLQAIIDAVDSGVITNTKIAGVISNNKNAYALERAEKHGIPNQCISPKDYESREIFNQEFMKAVDALQPDLIVLAGFLVVIPAEMIAKYRNRMINIHPSLIPAFCGTGFYGLKVHEKALERGVKVVGATVHFVDEGTDTGPIILQKAVEVEQGDTPEVLQRRVMEQAEWKILPRAIDLIANGKVKVEGHHVTIESMKVLIVGSGGREHAIAYSVAKSDKVDKIYCTPGNAGIAEFAECAPIGAMEFDKIVAFAKEKEIDLVIVGMDDPLVGGLVDELEAAGIRTFGPRKNAAILEGSKAFSKDLMKKYNIPTAAYENFTDPAKAIEYLKTEAKFPIVLKADGLALGKGVLICKDLEEAEEGVKTIMLDKKFGTAGNEMVIEEFMTGREVSVLSFVDGNTIKTMTSAQDHKRAGDGDTGLNTGGMGTFSPSPFYTEEVDEFCKKYVYQPTVDAMKAEGRPFKGVIFFGLMLTADGPKVLEYNARFGDPEAQVVLPRMKNDIIDVVEACIDGTLDQIDLQFEDNAAVCVVLASDGYPVKYDKGLPISGLDEFGKHEGYYCFHAGTKFDGDQIVTNGGRVLGVTAKGKDLKEARANAYTATEWVKFDNKYMRHDIGKAIDEAMLIEIDFNSNEAIYVQLQNQIIMGIATDAIREGDTLPSVRQLADTVGINMHTVNKAYSILRQEGFIQLDRRRGAVVAIDADKAQAMLKLREKLAILLAKGCCKNISREDVHALVDEIFDEYRRMDYTRQAKEVLKIAEKSAKEMAHPYVGTEHLLLGLRKVYTGVAAQVLGANGVDEENIQKVMSELISPSGEMTGRKRPEFSPRLEYILEDSKVEAEQFHSEEIGTEHMLIALIRDIDCVATKILTTLGVNLQKIYQEIFETVGIDPKAYQEEYGPEGGRKNGVLDQYGTDLTAEAEEGKLDPVIGREEEIGRLMQVLSRRTKNNPCLVGEPGVGKTAVIEGLATQIAEGIVPEGIRGKRIYTMDLASMIAGSKYRGEFEERMKRLIQEVKAAGNIILFLDEVHTIIGAGGAEGAMDASNILKPSLARGELQLIGATTIVEYRKYIEKDAALERRFQPITVEEPDKEQCLEILKGLCSRYEKHHKVKIQEEALEAAVNYSSRYINDRFLPDKAIDVVDEACSKVSLRGFKVPENVYKLEKTQTELAKELEDAIKSGNMTEASMLHKELNEAEEKLEQIKKRFHKRNNVKHLEVTEEDIAEVVSQWTKIPVSRLAESESAKLNKLEQTLHKRVIGQDEAVTAVAKSIKRGRVGLKDPKRPIGSFLFLGPTGVGKTELSKALAEALFGDENSMIRVDMSEYMEKHSVAKMIGSPPGYVGHDDGGQLSEQVRRHPYSVVLFDEIEKAHPDVFNILLQVLDDGHITDSQGRKVDFSNTVIIMTSNAGAQSIIDPKKLGFNTKEDAAGDYKRMKNNVMNEIKFIFRPEFLNRIDEILVFHPLTTEQMQKIVGLMCKELVKRAKEQLGIHLTIRDSVKKHIVETGMDKKYGARPLRRAVQNQLEDKLAEAILSGEIGRDMDVVARMSKKEIKFTAKTTNMAAVKELLRAETDGTLSFGDYTLDSKTKLDGFDFQGDIYKVKTFKEITKLEKNGMFVYESVPGTAVENFKATENVVSFKVCGETDFQFTLGMEADAEYVVYMDDVNIGDMTTNLSGKLSVSAEAEAGKEIEIKVVRKMAKAKKSIYFCQNCGHEESKWLGQCPMCKEWNTFVEEKVSTPVSGVSRGSSVAKPKSQVVTLSSVSTTDEERTKTGIKELDRVLGGGIVQGSLVLVGGDPGIGKSTLLLQVCQKLADKQKKVLYISGEESLKQIKLRANRMGEFADSLFLLCETNLAAIQSVIEKETPDVVVIDSIQTMYNEEVASAPGSVSQVRESTNVLMQLAKGLNISTFIVGHVTKEGTVAGPRVLEHMVDTVLYFEGDRHASYRILRGVKNRFGSTNEIGVFEMRREGLCEVENPSEFMLSGKPENASGSVVACAMEGTRPMLMEIQALICRSNFGMPRRTAAGLDYNRVNLLMAVLEKRMGLPLSNYDAYVNIAGGIRMNEPAADLGIVMAIASSYKNKPIAEDTIVFGEVGLSGEVRAVTMPEQRVAEAKKLGFKTCIVPAVALKSIGKVDGIEVIGVNSVNQAMNYIMFHLLLSVIYLAFISLGLPDALLGSAWPSMYPAFHVPVSYAGIISMIIAAGTVISSLQSDRLTKKLGTGKITAISVATTAVALFGFSVSHSFIALCLWAVPYGLGGGSVDAALNNYVALHYESRHMSWLHCMWGVGASIGPYIMGYALSNKQGWSMGYRYISIFQIGLTAILIISLPLWKQFHKKEHVGQSASGSGNTLPVLTLKQIFQIPGAREILFAFFCYSAVEQTSSLWASSYLVLHLGYSSEKAAGFASLFFIGITVGRGISGFITFKLNDSQMIHLGEGIILLGVLAMLLPLGKTVALAGLILIGLGCAPIYPSIIHSTPAHFGADKSQAIIGVQMAFAYIGTCLMPPLFGIIARSISITLFPAYLGLFLCIMFFMYETVIRKTHTVMEQTSFTERLMEFGLTRQEASIYQCLLTEGKVTGYEVAKQTGISRSNAYNSLASMTEKGAAYLVEEASTRKYVPVPLNEFCKNRVRKLEESARWLQEHMPSEKAYAEGYITIEGAENILNKIKNLLSQVDQRVYISCTRNYLLLLIRELDALMEARKKVVIITDQPATFHNAKVYLGESRGMMSPATSLAYFGIEKQKAKGLEIFGSEAFCFFDCFPVVFEKDSPMKKTKIICTMGPNTNDESLMRKLVQNGMDIARFNFSHGDHEEQKGRMDMLKKIREEENKPIAILLDTKGPEIRTGVLKDGKKVQLEAGETFTLTTDEIVGDNKIVSITYKGLVEDVKAGSTILIDDGLIELKVKDKKGNNINCEVVNGGELGEKKGVNVPNVAIRLPAITDKDRDDLKFGVEQGVDFIAASFVRNAECILEIKSFLRECKAPYIPVIAKIENFEAIKNIDEIIRCADGIMVARGDLGVEIPAEEVPYLQKTIIQKCNDNFKPVITATQMLDSMMRNPRPTRAEVTDVANAVYDGTDAVMLSGETAQGKYPLEALQMMVHIVENTEEHLDYDMILRKAGEHRLKSASSALAHATVTTANNLRAKCIVTPTVSGATARVVSKFKPKTGIIGISPDEATLRRMQINWGVRPLKSVAVYTTEDICDNAIDLICAKQLAEAGDMVVLTLGIPSTNVSENRTVSNMMRIAMVDDRKMNNWLDKLERKFSRYAIPNLMTYIIILYAAGFVLNLINPTFYSQFLSLDAGKILQGQIWRIVTFIIQPPSDSLIFIVFVLYLYYMIGKQLEAAWGAFRFNLYFFSGMLFIVIGAILAYLLTGAVLPMDTWYLNLSLFFAFAALYPDIQLLLFFVIPIKIKWLAMLDGLYFVYAIVQAFLPAYGGGDYGIYYKANALAAFISILNFIIFFLSSRNMKPYSPGQMKRKNDFKRKMRQAERPVNVYANGAKHRCAVCGRTEMDDPNLEFRYCSKCNGNYEYCQDHLFTHTHVKMNQKELYTLGIDIGSTTVKIAILDENNEVVFSDYERHFANIQETLSDLLGRAIHKLGPVHASPVITGSGGLTLAKHLGVPFVQEVIAVSTALQDYAPQTDVAIELGGEDAKIIYFEGGNVEQRMNGVCAGGTGSFIDQMASLLQTDASGLNEYAKNYKALYTIAARCGVFAKTDIQPLINDGAAKEDLAASIFQAVVNQTISGLACGKPIRGHVAFLGGPLHFLSELREAFIRTLKLDDEHIIAPTHSHLFAAVGSALNSKKDLDVALIDMQRRLEGKIKMEFEVDRMEPLFATEADFKEFEERHAKHQVPVKDLATYQGKAFLGIDAGSTTTKAALVGEDGTLLYSFYHNNDGDPLGTTISAIKDIYSKLPEGVEIVHSCSTGYGEALIKAALLLDEGEVETVSHYYAASFFEPDVDCILDIGGQDMKCIKIKNQTVDSVQLNEACSSGCGSFIETFAKSLNYTVEDFAHEALFAKNPIDLGTRCTVFMNSKVKQAQKEGAEVADISAGLAYSVIKNALFKVIKVSDASELGKHIVVQGGTFYNNAVLRSFEKIANCEAIRPDIAGIMGAFGAALIARERYVDCEGTTMLSIEDIEAMEYSTTMTKCKGCTNNCRLTINHFSGGRKFITGNRCERGLGKQKTTNKLPNLFEYKLKRYFDYEPLAEENAPRGLIGIPRVLNMYENYPFWFTFFNKLGFRVVLSPVSNRKVYELGIDSIPSESECYPAKLAHGHVQWLINNGIKTIFYPSIPYERNEFAEANNHYNCPIVTSYPENIKNNIDAIVHGEVDFLHPFISFASEETISYRLVEELSEKFHIPADEIKKATHTAWEELAACRKDMQKKGEETIKFLNETGNRGIVLAGRPYHIDPEVNHGIPELINSYNIAVLTEDSISHLNPAEHPLNVMDQWMYHSRLYAAANYVKTVDNLDLIQLNSFGCGLDAVTTDQVASILNDSDKIYTSLKIDEVNNLGAARIRVRSLLAAIRVREKRGDKREIKSSAIKKVAFTKEMRKNYTILCPQMSPIHFELLEPAFNSSGYNLQVLPNDNKQAVDVGLKYVNNDACYPSLMVVGQIMEAILSGKYDTHKIAVIISQTGGGCRASNYIGFIRRALKKAGYGYIPVISINLSGLEDNPGFKLTPNLILRGIYGAVFGDIFMKCVYRLRPYEAVPGSVNAMHRKWVKVCQDFVSNGYPSRRKFKRLCREIIEDFDNNIELLDIKKPRVGVVGEILVKFLPAANNYLVDLLESEGAEAVVPDLLDFLLYCFYNQNFKVEKLGFEKKKATTANLGIKALEWFRAPATEAFAASKHFTPPAKIHDLGKMASDIVSLGNQTGEGWFLTGEMLELIHSGAPNIVCTQPFACLPNHVVGKGVIKELRRRYPESNIVAIDFDPGASEVNQLNRLKLMLSTANKNLNKMALFESYERRIDKINEVLAGYGISSIEEAQQITKDAGLDVYNQIKGIQPICFENACWAYIVGAAIAIKKGCKTAAEAAAAIGEGLQAFCIPGSVADQRKVGLGHGNLGKMLLEEDTECFAFLAGHESFAAAEGAIGIAEKANKVRKKPLRVILNGLGKDAAKIISRINGFTYVQTEYDYYTGELKEVQRISYSDGLRSKVNCYGANDVREGVAIMHKEGVDVSITGNSTNPTRFQHPVAGTYKKECIEQGKKYFSVASGGGTGRTLHPDNMAAGPASYGMTDTLGRMHSDAQFAGSSSVPAHVEMMGLIGAGNNPMVGMTVAVAVSVEEAAQAGKFMIYSQEVEMMCPVAQGANHGPAPIPEEAKWVQAKEIKDISGFTHGVGWCAPQQGACKLTLNVKDGIIQEALVETIGCSGMTHSAAMASEILPGKTILEALNTDLVCDAINTAMRELFLQIVYGRTQSAFSEDGLAIGAGLEDLGKGLRSQVGTMYGTLAKGPRYLEMAEGYVTGIALDENDEIIGYQFVSLGKFTDFVKAGDTPNEAWEKAKGQYGRVADAVKIIDPRKEMPKKEKIPYKNVEKNQLTNVEIYEKINTSMDVKEITNLTISKLTMNLPNKLTVLRVIMVPFFVFFMLTGVGGAANKWIALIIFCVASLTDMLDGKIARARNLVTNFGKFMDPLADKLLVCSAMICMIPLGKLQAWFVIVIIAREFIISGFRLVAADNDIVIAASYWGKFKTVSQMFMLILLIADLGGAFNMIAQVLIWVSLVLTIVSLIDYIAKNVQVLTQGGMMNIFFVSLGCDKNLVDSEVMLGLLDAKGYQIVDDETQADVMVINTCCFIHDAKEESIQTILDMARYKEEGRLKALVVTGCLAQRYKQEIIDEIPEVDVVLGTTSYDKIVEAVEEALEGKSEVELADIDALPLPETKRLVTTGGHYAYLKIAEGCDKHCTYCIIPKVRGNYRSVPMERLIKEAQELADQGVKELILVAQETTVYGQDIYGEKSLHKLLKELCQIKGIRWIRLLYCYPEEIDDNLIQVMKEEPKICHYLDLPIQHASDAILKRMGRRTSKQQLIDTITKLRKEIPDIALRTTLITGFPGETQEQHEEVMEFVDEMEFERLGVFTYSPEEDTPAATMPDQIDEEVKEDRQADIMELQQEIVFDQAEDMIGKEVLVMIEGKVADENAYVGRTYRDAPNVDGLIFVNTDEELMTGDFAKVKVTGAAEYDLIGELMMLHPSYTDLMKVVNKDVEEGETKVVNSRYSIVMATAKRAREIIDGSMPLVDAKVGEKPLSIAIDEMNQGKMTIIAQDEEEEEMREKGILIVVSGFSGSGKGTIMKELLKQYDNYALSISATTRNPRPGEEDGREYFFKTVEDFEKMIAKEELIEYARYVDNYYGTPRAYVEEQLEAGKDVILEIEIQGALKVKEKFPDTLLLFVTPPSAEELKSRLVGRGTETMDVIEFRMNRAKEEALEMDQYDYLIINDDLQECVEEMHQIIQGEHRRSFRNAEFIEHMKEELKGEMIKSMTGFGRCEAADEERKFTVEMKGVNHRYLDANIRMPKKLNFFESAIRSLLKESVHRGKVDIFITYEDFSESQVSLKYNETLAAEYLEKFKMMEEKFSLENDIRVSTLSRYPEVLTMEEKMDDEEELWKGLKKALDGAIAQFVQTRTVEGENLKKDLIAKLDGMLELVGQIEERAPKIIAEYREKLEGKVKELLEDTQIDEGRIASEIVIFADKICTDEEVVRLRSHVEHMKATLQSDDSGIGRKLDFIAQEMNREANTILSKANDLETSNIGIELKTEIEKVREQIQNIEMAFDGITVAAVVQELEHTLVGGRISKIAQPENDELLLTIKGNEGQKRLYISASASLPLIYLTNENKPSPMTAPGFCMLLRKHIGGGRITAVSQPSLERIIHLDIEHLDEMGDLCRKKLIIEIMGKHSNIIFCDLNGRIIDSIKHVSAQMSSVREVLPGRDYFIPDTMSKKNPITATQEEFISAILAKPMPVSKAIYSSMTGISPVIAEEICYLAGVDSSMTAHDLSEDVLTHLYRQFTYYMEDVRQGNFHPSIYYNGNAPKEFSALPVTHFNEYTKKEFFSISEVLYTYYSTRNTLTRIHQKSADLRHVVQTALERNRKKYDLQSKQLKGTEKRDKYKVYGELINTYGYNLEPGSKELTALNYYTNEEITIPLDPTQTPGENAQRYFAKYNKQKRTFEALTELIQETADDIQYLESISNALDIALSEADLAQIKEELMQSGYIRRKHTKKKVKLTSKPMHYISSDGYDMYVGKNNLQNEELTFSFANGNDWWFHAKGAPGSHVIVKSGGDELPDRTFEEAGRLAAYYSKNRGADKVEIDYIQKKHVKKPNGAKPGFVVYYTNYSLVIDSDISNIKNVQDMKKDLTTGNVTKTMLLFAGPMILGNLLQQCYNIVDMLIVGRALGAGALAAVGSAYSLMTFLTSVLIGMCMGSGSLFSYSIGKRDTARLQYEMTASFSIIGIVTIVMNIVVFVCMKPILNILQIPEDIYGMMQEYVWYIFWGIFFVFLYNYFLFLLRAAGDSVVSLVFLGISSGLNIVLDLALVYGIRMGIKGAAIATVISQIVSGIGICIYTWIKMPELRFSLRPERIKESQSVMGEVVRYSAASSIQQSVMNFGILMIQGLVNSFGTAVMAAFAAAVKIDSFAYMPAQEFANAFSIFISQNRGAGKEKRVQKGVRSAVTVSAAFCICVSVLIYFGARYLMLAFIDGSEHEIIRVGIQYLHIEGAFYCGIGILFLWYGYYRAVGRPEMSVVLTVISLGTRVLLSYTLAPIKSIGVIAIWWSIPIGWFLADVTGYVYLQYMNKKAKMCRSMRTNELMLYKHMEEGQILQDMTFLMENYQNDYYNMEDMKGLLYDAVNEILEMAVSHGFEGDLWHNYLTYLMASHENAYSTSCEIVGPVDGSINQVALHDFEIFKELFDYDFADLENVMGVDCISMLHDYVGTSGHGSVFNQRIRDRICDLSKALAETETAVEFKDIMTQFYKEFGVGKLGLHKAFRIAHTEEGALIEPITKIAHVHLDDLVGYEIAKKKLIDNTKAFVEGKKANNCLLFGDAGTGKSSSIKAILNQYYDQGLRMIEVYKHQFKDLNDVIAQIKNRNYKFIIYMDDLSFEEFEIEYKYLKAVIEGGLEKKPDNVLIYATSNRRHLIRETFKDKEDRDEELHTNDTVQEKLSLVARFGVTIYFGKPDKKQFQEIVRELAKKNGIDMLDDELLLEANKWELSHGGLSGRTAQQFIDYLAGTRMTSLEELRTQLSDVDDQITDLYEKRMKICEDLGTCKIKNGYKTFDRQREKNKIAEVMGKVSSDFNKKGIGEVYELLLAISRKLQYKQLVEAGALGRLPFIGIDSLDKDTARVVFQGTEGAYSQAAMEHYFGKGCNSYHVHTFREAMEAIEEGAADYAVLPIENSTAGAVNEIYDLLVEFENYIVGETIIPIKNTLSGLPGTDISEIERVYSKAEALMQASHFLGEHGDWQQISVANTALAAKKILEDQDKHQAAVCSAYAASVYGLSVLADSINDEKNNSTRFIVITNQKVFLKDAKKISICLELPHESSSLYHLLSHFAYNDLNMTKIESRPMEGKSWEYRFFIDFEGNLADPAVKNAIRGLREEGRNLRILGNYMNTLECIKTRRSIRKFKPDPVDHATLESLIGAASYSPSWKNTQITRYIAIEDSSILDKIVTDYTPDFNAKIIKQAPMLIAVTFKKGRCGFERDGSYSTKKEDRWQMFDVGVASQTLCLAAHEAGLGTVIMGIWDEDGITDLLHIPEDQELAALIAIGYPDIDPDAPKRKSVDDLLTYLMRHLLSPLDFSVEELDNLMDLAKDIEANPKKYAHACEGKKLATLFYEPSTRTRLSHEAAMINLGGSVLGFSSADSSSASKGESVADTIRVISCFADICAMRHPKEGAAMVASQHATIPVINAGDGGHQHPTQTLTDLLTIRSLKGRLDNMTIGLCGDLKFGRTVHSLIHALVRYPGIRFVLISPEELKLPSYIKNDVLDRQNIPYEEVVRLEDALPDLDILYMTRVQKERFFNEEDYVRMKDFYILDNKKMELAKDDMYILHPLPRVNEIATEVDNDPRAAYFKQVQYGVYIRMALILTLLGIEVMVKNTLTVGRIEEGFVLDHIQAGRSMDIYKYLHLDKLDCCVAIIKNAKSNKMGKKDIMKIECPIDFMDLDILGFIDHNITVNIIKNSEIVDKKALHLPHEIRNVIHCKNPRCITSIEQGLDHVFVLTDPEKEVYRCKYCEEKYDGRRKMKITYLDHSGFAVEYKKYVLIFDWYKGKLPEFDSEKEIYVFSSHSHYDHFDRKIFELENIYPNVRYILSADITEKPVPSKVWFVIADKEYRIGNLKVQTLHSTDAGVAFLVYVDDRIIYHAGDLNWWHWEEESEYYNEQMRMDYQKEIHKLKNMRIDVAFVPLDPRQEEQYYWGLDYFMKHTDTKLVFPMHMWGHYEVYEKLMNNPQAESYKEHVMHVKVPGQVFELPMRVAIITANTDIYKGTKANESGEAVKLVAEEAGLEVVFMRALPLDREVLSTVMKRMTDGKTADLILTTGGAGCNPGDCTPEATMNIVDRPVPGIPEAMRAHTMKLTRRSMLNRSAAGISGDTLIVNLPGKAQAVKESLRFLLPELVHAVKVIKGEAMKDYTFKVPQDIVFGVGSLKRLPELLEKSGSKKMMVVSDRGLEKLGVIQKVLDIVEAEGIETVSFLDILPNPTVDMVNAATKVYKESGATSIVALGGGSPMDVAKAVGVLARYGGSITEYEGAHLVPGPIEPIIAIPTTAGTGSEVTAFSVITDTSRNYKLTVFSYELLPKYALLDPEMIMSVPPMVAASCGIDALIHAWEAYTSLGASPFSDAMAEKAMELIGGNIRRFVANRKDEEAACAMMSGSMFAGIAFAWARLGDVHAMSHPVSAFFGVQHGVANSILLPVIVEYNALADHGRYEKIYNYISEEKEPVKDFKPEMLVEEIKKLNASLGIPKTLSEVGVTEDKIPQMAADAMKSGNIAANPRQTTLKDVEMLYRKALMDTEQLYKDIKARTNGEIYIGVVGPVRTGKSTFIKRFMDVMVLPRMEDEHKKERTRDELPQSAAGKTIMTTEPKFVPKDAAVIRLNQDVEVRIRLIDCVGYMVKGASGHEEAGHERMVKTPWYQEEIPFTKAAVIGTQKVIHEHATIGIVVTTDGTITDILPENYEDAEARTIRELQSIRKPFVVLVNSKKPHGQEAKEKAKKLEDTYGVKAMTVNCEQIKEEDIYRILEAVLYEFPISEVQFYIPKWVEMLPVTHKIKQDLLEHIQKILEHLEEIKDAAALTGRPESPYIKDWYVEQIQMDTGCVIIQIHMYEKYYYEMLSEMTGTTITGQYDLIKTMQKLSILKNEYENVEDAFTAVRMKGYGVVSPTKEEIVLDEPEIIRQGNKYGVKIHSQAPSIHLIRANIETEIAPIVGNEQQAKDLIQYIKNEEKMEGGIWKTSIFGKTVEELVMDGMKNKMAVINDESQEKLQDTMQKVVNDSNGGMVCIIIMERHQITGHTELIGLLAYPIRHSQSPATHNAAYEKLGVDIVNLAFEVDAPELEDAIKGLRALKMRGANVSMPNKTIVHQYLDEISPAAKLCGAVNTIVNKDGYLVGHITDGIGYVQSLKDNDIDPTGKKVTIVGSGGAATAVEIQAALDGVAEMSIFARDDKFKQNALDTVKKINENTNCKATFYPLEDLDKLKEEMHSSYLFTNATGVGMKPLEGITYIPDPSFFRPDLIVTDVVYAPHETAMLKMARHAGCKTMNGQGMMLFQAIAAIELILGKRVDSEYMKEKLGISYVYEDMNTVKVRNLELGNGIPAICIPNVGKAKEDILSLTRTYLDMHMDLMEWRMDWYEDVEDIAKVTELVKELRDVMGDTPLLCTFRTDKEGGVHPMSTEKYAELNKAVAATGNADIIDVEIFTGDDTVREMIDAIHASGAKVIASNHDFDKTPAKSDLIYRLRKMQDMGADIPKMAVMPQTKKDVLTLLSATEEMASDYADRPIITMSMAGLGSISRIACEAFGSCLTFGSGAQASAPGQIGAEKLHQALQIVHDALMSPKKAKRANELPYIPLGPFQWRIPGIHYRVEYVEFFQGLILGATALSSIPYLTDNLGLPYELAWSCVIIEVFMYMLHGWLGDPVVPGWITPTLPFTLAYLNGFEKGPDRIQAMIALQLLVAFVFIFMGITKLADKFVNGVPNSIKGGILIAAPITVLQGQLSDGSQLMTAPVATLAGTLLLAFLSFSPFCEKNRSKYKILDIMAKYGNLFPYLIAMVAGVALGELSKPVLELGTVIRIPDFSNIFHTVSIFAVGFPPLSKFISAIPLALICYVLAFGDFVTSKTLVEEAQESRSDEYIDFNSSRSNLISGLRNLILAIFAPFPPLAGPLWVGMTVSVAMRYKEGKKAMKSLIGGMSSFRMATFISVILVPIVSFMKPIMGVGSAITLLFQAYVCARIGMEYCQSNTDKSIAGVMAAVLAFKGSGWALLVGFAMNLLLSNMDFQKKKLGVLTTEELDQVDAKRDEEAQRLLTQKKQGMKAKKYLWSIICVYFCYLTHGIQAIILSQNNVNFAKQWGFNMSDPQSAAYAAGLAAVSTAVAWTGFGKFVSVWIGGEISDRVGRKKLMIGGAALYIICFLGFLFTKNALVASVCGFASGVATSGFWDASGYPAVQEAYPAAPGSALVGIKFFVSLSGMVYPLLVVHNANSGNWKLNVMIPVVMSIICLVLAIIAPFVYDDQKKASEGTDGKSKDAVQAEIDAAKAAMLTKPGKFVVFLVMFYAFLCMAIMYGAQQYTKAFGLSVCGLSEMQAAGMTSIYTIGSICAVLFWAFMMAKLKWSPLKVVLIDSICTAVALAGVLFIHQVAIIYIAIAMLGFFAAGGALQTGLAVVQLFNPGPKGRNTGIYYTFMGAASYLIPVVAAQLTKASGEANAVYSLMIMLLVFAILAILSSLYLVAQHKKIFGKSALMEKRISGHTGLMALFGTPVGHSGSPAMYNFSFQHDGLDYAYMAFDVTEEEMPKVFESIRLLNMRGGNFTMPCKNIAAQLVDKLSPAAEIIGACNVFVNDDGVITGHITDGVGFVKNLELNGVPVKDKKVVVLGAGGAATAIQVQLALDGAKEVNIFNIKDKFFERAEGTKAKLAEKCPECVVTVDDLDDKAKLEEAIKACDILVNATIMGMKPHQDVTLVDKSLFRKDLVVADTVYSPEKTKMILEAEEAGCKAIGGVGMLQQQGAVNYGLFVGKEMPLAEYQEFQKAQAKMKFKHMFSPIQIGPMTVKNRFVVPPMGNNFAKTDGTWSDESVAYYAERAKGQFGLITIEATVVHKGAKGGPRKPCLYDDNSIESLKKITDACHAEGAKISIQLQNAGPEGNAKNAGAPIQAATSIAAADGRDIPEAVPTEQVYELIKGYGDAAVRAMKGGADAVEIHMAHGYLVNSFMSPRTNKRVDEFGGNFENRMRFSRLIVEEVKKRTEGKIAVLARINSTEDMFGGLDNHDMCAIASYLEDCGVDGLHVSRAVHLKDEYMWAPTGIHGGFSAELVANIKNCVSVPVITVGRYTEPQFAEQMVKLGKADLVAFGRQSLADPHTPEKAQEERLEDMTPCIACLQGCVANMYAGKPLCCLVNPVLGREVEGLPKAEKAKKVYVIGGGVAGMCAAFTAKRRGHDVTLFEATDKLGGNMRLAAYPPGKGDITGMIRSYIVKCEKAGVNIKMNTKVTAQMLKEDTPDAVILATGSETLVLPFIKGIHNPDIVYGVDCLEGTRPVGHKVLVVGGGMVGAETADFLAEQGHEVSVIEMRDAIGPDVIHEHRIFLMEAFEKYGIEQITSAAVSEIFSDGVSYKNAADKSDETIYEARGFDTVVLSMGFSSRYTHRDGQNVVYDFADELKDIVPEVHVVGDAVRARRALDATKEAYDVALKLMTDFLTADTNLPSYMMFPRFLLDMEINETAKMLYIILLDRARLSQKNEGWSDTDGHVFIYFTIEALAEVLHKSQMTVKTALAVLEKQELIFRKRQMQNNIRNTNLRFNLDKEQQRRAWEYLQTMDRQDFKSYSQVISLALVDYFDRYYRTQADPYLETREREELFVKQIVDAVENSLKQALPLFLSGLTAGMAQREPQIRASFPAPENSQPDSDVDWDFLGEMRELRNTKIIAVDHGYGNMKTANTVTPTGIKAYETEPIFTGNILEYNGIYYRIGEGHKEFIPDKAMDEEYYLLTLMAIARELNVFSIREADVHLAAGLPLTWIRNQREAFRSYLLQNPEVHYRFNGKEYHLRFVGCSLYPQGYPAIVNHLGNFKGTNLLADIGNGTMNILYINNKKAQESRCWTEKLGVNQCMIAAKNAVLDKFGVKIEESTVEQILRFGTADISAPYMDCISSIARQYVAELFSTLRKYEYNPDLMHLYVVGGGGCLIRNFGTYDKLRVTIIDDICATAKGYESLAYMSLKRRGMKYKILVVDDDKELVKMLCSYFNMKQYETITATDGMEALNKIKMKPDIILLDINMPRMDGIEVCRLIRSKVLCPILFLTARVDEDDKINGLLSGGDDYITKPFSLRELEARIVTNIKREERHQQKTEYRFMDEMLIDYSEKIVAIAGHRMEFTKIEYQIIEFLSMHPGQVFDKERIYAQVCGYDAEGDSRTITELVRRIRKKIADYSEKEYIETVWGIGYRWKKMEKIRNLSLKKTILLYFVISLTAAFLLSGFTVHFAGNMQNKIWEKYIDYADYTDVFQQYGKKYEIEISRPNQSQMNRLDYHLSEMCDFMETYSVLIFSIVGSVVAVFFFYKNKLKTPLQELKDASQMIADNELDFHVSYENKDEMGTLCKEFEMMRSDLADNNRKMWRMIDDEKALRNAIAHDIRSPLSILRGYQEMLLEFVSAESIKTEDVIDILQTGMYQIDRIEHFTEKMRKMSHLEQRELQCSEIELSELAKKIEAEAAMLSKKESKLCKVERVQEQNIVKVDEELVMEVTDNLLENAVRYAQKSIALQIKKKDGFLIISVEDDGIGFVDTEEKVTEPFYHKNPQDDLKHFGLGMYISRIFCEKHGGNLKIYNARQGGAHVEALFKAEMYDVVKEIKKGRDTMKTIIKRSILDYLKNPVLWIGLIIIVASMYQCLSSYLQIHYIKQNEQITQNDVALEDADVMDGYIPTSDDKERRREWEDTIKETLMDTSKNGFGFSRQEADHVMKEIQNMDVKTASEFLESQYGYYNAIYAYEDLEIHKGTAEEINHYIERKLSEHSFSWYFAKKFTDFAGLHMAFFATVLLSFLFIQDTRKSTYELLHTKPVTAVQYICGKVISGFISMLGVLVILNVIFFMLCLKTSLESGFPVTPIDFCVNSLIYIIPNLLMICCVYTITAVIFKNPLPAAPILFLHIIYSNMLTMKNDIYYMRPFSIMVRFPGRFFETHVAKMSNINQIILVISSVILVCISVTIWKRRRVHMKTELKNCLSLYKIFYSCAFILILCAIHPIIYYEEIGSAIQSPIAFLTIIFCSDTYLMEVKSKRADVFHLYDQKKQLKVISQRVGVQILYLLILSCVGYVLFFWQKPGSVNEGISGIQIFLLYFIAMFGTIWLWSICSVILCTLLRNMWAGIGCLFGIVIGLISKAGSSFFGNLGLFSFSFCEPTQLMSESWIYGTLVSFIAGLFLFAVLPMTLKKRGMSIRINDLTVRFKNGVVAVNKASLEIPKGIYGLLGENGAGKTTLMRVLTTVLKQTEGMVSLDGILYNEGNYEKIQKKIGYLPQEIDLYPNLTVKECLVYMGGLSGVARNDLEQRITYYLEKTSLTEHQNKKMRQLSGGMKRRVGLIQALLNNPDFLIIDEPTTGLDPEERIRIRNLLVDFSKDRTVLFSTHVVEDLAATCTQLAIMKKGSFLYSGSVSGLLENAKGCVWNCTVQNAEEARLLEANYSISSKQYVENGIHMKVLSKGKPNENCVLDNDITLEDAYIYLTNSIYLMTANLPQAKTHFKRAFKIYEKIWADEPEMIEAKYQEIQELYPQIGFCIGKNLSGLLTKMKKKKTLLGLIAAIAIIVIGICVWYFQVKKPHDLAETKFNAAVKEVEAKNTELTSAMNDAQKILDKKEAVYDNTTKEAFITALSDAKAAQRKIMGLFNFFNKKPSLSVIELQNDLRILNDCASLIEKTVNPDVFFSRFDLYYEKLSILADAQKRKIVVVKGDNIAKKYSKLNTPTAKADKINTFIKRYWDSTCSKSQKLKTEKGKNNCFENFKSSLSNYDSRLPDSCIEYYNYLYTSAPRTASMPRNQIPAKQINSMQQFKASDTYCQTIYDLYYKDYSEKPFISQDREFNTNWIEQSKMFPNQSLVSEAMMKRYPDGLLPGHIYMLYWLKKYTNKRVPSYFEYKYGIDFYKEKEFLTQNGYLENSKPTHKGELAINTHQDVIVKHDSNFQVNLSDNADLNKLKDPADINLKALELEKQEDVDTAITLYEKNVSHRFDGNCPYDRLAIIYRKKKDYDNEIRVLETAIDVFTHDVPASRSDRSIKLTRFKERLTKATKLKMNNQKVLMNTYEKLQEEACKDGIDVIDYPFKSKKIKGLYCDGTIAIKDNIDTTTEKACVLAEELGHHYTSVGNIIDMEYTGNRKQERQARLWGYNRSIGLFGLIRAYEHGCKDKYEIAEYLDVTEEFLENCIACYRDKYGILTIVDNYIIYFIPHLTIAELIMNELESNVKALIIDRYGSMKKFSEKIDMPWTTLDSILKRGIANSNITNVLKITRELGLDSEKLVDGIIVFTQDEPTTLAAHFDGDEYTESELDEIRQFAEFVKNKRVKMFPNLEAEMARNKVTQVKLAEILGITPTTLSFKMNGKSTLSLKECVEIKRKAFPDKTLDYLFATDETGSEKGEMASIINVFKSLSLDELNFAIALLALLLSAYSIYYTQKCNRRKIKIHADVLYFEEPDPPIHWFTIHNVSAVSVTITDIQFFSPNGSALHPLTSYEPQQTYSEAGPFQHVLSDIIPDYKYSEPLLDEVVLYPHTSEEFGYYFDSPYTSMKIDITAQERIHHFSRHQSFLVHFPNIENMSGYNFNHFTGKTRGKASRKKKIRMKQNHKDKYEKYSNNRGIVRMKKIIFVLFACLILLTGCSQKITEGEIYEKEFLPEETRTIIIPMIHTNGKSLYTTYVPVTHHYPDRWRISIKSIEKNDDGDYDTADYYTTEEVYNSCEVGDMFSYDENRDCEEEPVEKSKMQGYYDSEHSGKGLETPTGQLNINVKNLPEFKELVEQAKHQADQLQRTINQLSYFELKIDFSCGEEVTSEMKHIFILRLIRKEDGSLISERDMDTMAEKDKDEAVNELNGNSVGYLGYQKMKRRGPRTKWQRIIRETVFEILIGAAIGLAFDVMLFIWLLVRMHEIPKILTEKEFAKRLQLAKETLNEYNCKNDIEKGLIVMSGWVSADGQPVYTPAQLKRLFDLVYKGDDTDGTENVADAICMKKRYKRLIYTFEHSVEVYEYLDGKYGAPGTKRGKKRKATLEEIRFRNQWNRERKARHKLKTWFHENDYLVLFTYKKNKRPPDMETAKKHLAQAMRKVREKYKKAGKKMRWMANIEVGTKGAWHVHIVINRIPDADIIIKDAWEHGAVTFKHLYEAGDFRDLAGYITKTPETCERYGEHLRETSYHASRNMPLKEPEEERFVQWREIKDRKGYYLDKNTYYEGTNKFTGYKYRYYTMIKLDRRIMLILDRASENKLEELVLVSRKLNGVLREIYPGVHKIEPDRAALLWCAIDDEIEKRQKQIDKILATESGAEQIVLRRACSELKKEYEQYNQLMEELYGEELLPATIPELLIGSVKRATLEMKESNQTLQNIKEAMKEHVMFRVDIYIVTKCSSNSKTLGKYGFVCTCAKKSGEIGKIQDTGQIKGTRHETEVKAITEALSRLNQSCEVHIHCEDTFVVNMIDYHISGWAGNDFRKTNGTPIANAEGWQKLMFDKFGEFDSADEINREAAAQLKEGDLDAIKTIAEENGLDPEDAEDFCTGAIDSLTTPLLAAIGKLEMESKDLGLKNMMEDWKNFLIQMCEEDDQMAQAVRKKGKSLEKCMAQILKVSFETKAQLDDRIVRAAGLKPPIYLGIPGKAQIRKIAEKYYKGEEKMRTYKGFTEDLKATYGNGIFQYEPGKTYREEKSKTRSTGFHAAEYLPDCMMWYGLNDKSRFFLCESGGSIDEEDGCSMVVSTELTLIKELDLLDIAGHTMMYMVEHPQRKWISMVGGVMITSDAAHTGAGRLLAIARGERPIVYGIEGTAVGWILESEGNIIAAKVGIVGQAGIEPGVKYTITANRELVEVQDETESNMKRKAIEKIEPAKTRKKGHIATVQTLDDIAIINVFNDKVLAVRYCINCKTGEHEYWTEKNGWKKGKLITAIEGNWYEWVWMKHDYKYPKIASEEDRKRLLDITQDKYCANDVWSRIDHMEYSYDYDIRQTAEHNRRAKINNFMIKAPKLPKDADEWFFEKTTGEDYMFKEKGTENFSCTNCGESFDRSELTPIHQGKKKATHNDMVRCPSCGKLVQVKTRTDHITAPPMPSFPWDIVKNLVIVSIALKEVLFVYHNAYFFINFYPMPSGIPFDIYTEDSMYPGDYKGTLKNTAYEDGTRIVEFLAAAGWKLNYNRLLSGVYQVKGYAEKIEYLAKGRFRNLLRETVACTEYPGWNMAYYGPLDIRAKNINKMFYINDRQKINRIRDENGGNEMVRWMQYSDETGEKIPTETLRWLLRCGLGPEDIRYHAGKYLSTTQLMNYISRQQKEQYPGFTEEAVLEQYNDYLSMCKACNKNMQDELTYRPRELKRRHDEIVIDKQQMDILKEMMASQAEREQYAQEMREKYPTAEQTLHEIKERYEYENEEYKIIVPESLVDIVKEGRALHHCAGSSERYFDRIETRETYICFLRRKEQEGVPFYTIEVEPSGTIRQHRSYMDEEPGIEQIRDFLKEWQRVLKKRLTKADKELAKISKEKRNANIEDLKAKNNTRVLQGLAEDFMDAEEIEELLEKAVMDELINYNGYEEFKQAVNRVLNRTVEDFVLTGYLLKQARDTDILQGSGYADEKEFAWSEYKLDTSQVSRYIKINDKFSEGGYSPKLQDQYQGFGYAKLALMLTLPEEVVEELTPTYSKTEIQAVKEEIEEEEKITDIEVILEGQKEEQKDLGNLEKALHQIFHDEPELYKTMYETVRTTCGTKYLQEVLAPDGDKIYSTRIQGIGRIMLYMHESKDITLHMVRSGDKEFYSWDDALSYCTMITDGEDAEKTWEEVYGEEFPKKEEIAPVQPKKRKESKVVKAKKPERKSIKTERSETKPAEPQTKQPDPPTKSEELPTKNEEKQTETPDTTAVPAETKEKESEKAEETPETKTEFQQEITDETQIPGQTELIKDFPEYCPPDMNTPEQQDQSEVKPAYATRRIYIASVDADTAAEYMGKAMEKAIRNMPGVSFGVLTKESFWKEFFETEVDRNGAEIECVNMCELMFPKPTKKKKRKHHPAPIVDTVKGECFLCRLEGIRRQQYTEEHHVFYGGGLRQVSEENGFKAYLCPAHHKDGPRAVHNCRETRELLCRIFQRKYEETHTREEFRALGIKNYLEDENGMDREILFKAKHEHVVVANKDLEGQWVEGLLWDEDYIYSKDLECEMLIDKNTICAYTGLHDKNGKRIWENDILMCHDNPKDLVKAVFGEFNVIEVESEEVIDSVIGWHYEVIPTDALSKCEPFCYSMPLTDTYIMLNEMEVIGNIFDDPELLEERDRKDERMEETERIMNSNGVIKMRLIDADAEIKKIEEEIERSYKVIDRWRSGGMPGSSLYDIDEKVRRIEKNIENCRIEIKMLKSYTTAYNPEAIVKKLEGKIEYAGRLMVEKPADKLDEIANNTAEDYIQAYTEAIELVKGGGNIEQPGIMEIKEKLKHWSIMVLTNRCLGCCLFCEWWDMCKWETEDRRKKSMSLQEWAKNEVEIACKRENPDRKEGEFDYGCACYESALKAFESLCEDGHSGMSIGFTKQILNRLIDGKPLTPIEDTEEMWKRSWTDEKGKHYQCSRMSSLFKTVTPNGEIKYSDINRCYCVNRNHPNYGYHNGFIGSIYDAMYPITMPYAPADKPDKIVCDELLTDPKNGDYDTKAIIYIEKPDGKKVKINRYFKESEESFKEISWLEYQIRRYKDWRRRKWLGNDEERHSMTRKDILKKYGFSWMSNVNLKEELSEQAAAEFEDLIRNLAEHNRGPAPPETGWKKRMYNQFMKGAGRMTRNMIIGIWLTAFLHPVIFPCVLHTAKEMEKWWDKKRVLWHVEQLRKIEEKYKEMAKEVKESPNKDRHLCKKCVYRSGRTGMGRCNYIAVAGHSRGCKPEECTVFVKGRKRKKALWMNHEGYQDPTAERALRRHNQMPYHMRRALTDLQDIASLFGFDIITIKDRRTGRKYRVEEKTDQMKRRPINKDKYGISKHRYLEVIHHCLQYPEWREELENMTDTVKAIQYGQEGKGSPSQASATECLAIKRAELQEKCERIEQTAIEADADIYQWLLEGVTTDYATYIYLRDAKGLPCGNQKYYRARRKFYWLMSKKIMARAPDQRAVEAKELYDKGMKLIEIAKKLDVPVGTVRSWKNRQCWDNATLQKKKRNVAKKRGGQPGNKNAKGHGGTGPLGNKNAVKTGEFETLFFDTLNPEELQLAETIGLDKEQLLLQEIQLLTVREYRMLHRIEALKNAETQQNEDEKSPPGMTVVKYTDGLEKGDCTELKEYAGILGQIQQIEDALTRVQAKKQKAIETIHKFGYDDAKLELATMQLELQIMKQDGGSHETADDGFMDAMNATASEVWGDQDVMYEKITNLKKKIQDMKKSRLQTVYNQIFKFKPFSKKQKQVLTWWCATSPVKDYDGIIADGAIRSGKTVCMSLSYVMWAMETFNGQNFAMCGKTIGSFRRNVLFWLKLMLKARGYGVVDHRADNLIVITRGKTTNNFYIFGGRDESSQDLIQGITLAGVFFDEVALMPESFVNQATGRCSVDGSKFWFNCNPSGPYHWFKVNWIDRAVGYIGKERAAELRAKDEPVKNILYAHFVMDDNLSLSEKIKERYRNTYRGVFYKRYILGLWAMAEGVIYDMFDNEKHVEDPNAFQTKLINSNRYVSCDYGTQNATVFLLWNKGTDGVWYCTREYYYSGRDKGRQKTDAEYAKDLESWLDGTEIKAVIVDPTAASFIAELRKRGFRVIKAKNDVEDGIRLVSTKLNLIKIIFSNVCQNTIKEFASYIWDAKAAERGEDKPIKQYDHAMDAVRYFVYTIFGDKPRLNRNLKGGLMLFRLPSEEELTDNKLNEFIAKHNAECAFRFKHLKDAYETDYQIFHQKPKPDYKPDNRIAVNFAKYMVDTFNGYFIGNPIKISVDDDAAGNIKKYVELLDQYNDQDDNNAELSKICCIYGKGYEMYYVDELGNIGITYLTPFDAFMIYDDSVLCRERYFVRLYIDSNDVLHGSVSDAEKVRWFTQKGKLIWEEEEKIHGFDGVPATEYVENKERTCIFEPAISMIDAYNKAISEKANDVDYFADAYMKVLGSRLDDDDLEHIRDKRIINLEGDADTVIVDFLQKPNGDTTQENLIDRLEKLIFQISMVANISDENFGTSSGIAMKYKLQGMSNLAKTKERKFTSGMNRRYKLIFSNPVSGMKEDDWVKLHYHFTPNIPSNVLEESQIAGNLDGIVSQETQLGVLSVVDNVQNEMEKIESEQEKAKTDPVMTQMFGGAGDGKPGVLEEPGNGSKETMIDEITKEINGFYARYAKKEGITMAEAKKRADKLDIDAYARKAKKYVAKKDFSDEANEEMRIYNLTMKVNRLELLKANIGLEMVSGFDDLQKYFDKKLTKRTLDEFRRQAGILGKSIMKNEKYAHAIVNASFKNATYSDRIWMYHGMLKAELEGLLASGLIKGENPRKLARHLTKRFGVSAYNAERLMVTELARVQTEAQKQSFIRNGFDEYVYVACTKGDVCPICKGLDDKHFKVDDMMPGENAPPMHPNCHCSTAAYMDNEAYEEWINSYQEHGLNFEDWKASRESEESKKKYKYADTVVKKSLLTSSEYRKKFNQVSGNSKVNRRAWNISKDMLSHRSGTKFEDLAFINVVNGKYAVNKDYDVESKANMNKQMKQLLEESEPETIIAIHNHPGSSVPSLADLMTCVKRGYNFGLVACHDGKVYKYWVDKNKFNSVNAGFALDRMETQGYDKEVRTWLEQAGVYLEVWMDEVYKRICDKLGCEPKDIAIPEFNTEDDSWESPFKVLTNEEMNYIVNHGCLPGIEPIQKMLEYLXXXXXXXXXXXXXXXXXXXXXXXXXXXXXXXXXVDKEYERICKKLGFIPSEYKYDGPIEEDDTWVNPFSVLTVEENDYLYENGYLYQKMWYGKMTQELEKLYDDYYKMFGRTPDGYMELEYGEGSYKAYVRDIKKSLKLKKELPEFVEMAQNDYFVIVYRVLKYLYDCLKKGEKPEVEYLVASTYNIPENYWIYILLSLINEEYIKGIRVDPTKDGVIFGDLQEAIITPKGIEYLFENSLIEKAKKTLKDVKDMIPFIMNVSIMGTCYDIRFVDEYPERLKGVGEYADGLFNRCNREIYILKNKDKDFTDEGRKRHMNRVLRHEIIHAYLEESGLSANSNMISAWAQNEEMVDWLAIQSSKIFATFQEVGCLDMIEVTVRKDEIKISGHANYAVSGSDIVCAGVTALALTLIKSIKDLTDDKIEYEISPGRVDIKYGNLLEKSKTLVDSFFIGICMIAEEFPEYVRIMMSNLQLFTEPGGDGGGSREGDGAGAGGNPGNSGNTTMSFDEFLALEGNQSEFDRRVQKAVNTAVTNAQTKWKTLTDDKVSEAEKLAQMTNEEKANYRAKKAEDALKEMKRQNARSDMAKEARKMLADEDINIPDELVMNLVAEDADGTKAAVETFSTMYKEAVQKAVKDALKGKPPKAGNGGDKPLMTKEQILAVKNPSERQKLIAENITLFQMHDIRRLGLQVFAAPNNLTGEVQIEVKAREIDFVTSFGKNLKALLDILGITRMIRKENNSVLKTKTVKGELQSGDVGEGEEIPMSRYTVEEKPFDTIKIEKYRKGVSLEAISEKGYEAAVQDTDDEFKSDLQNVVTDKFYAQLKAGSLTGHETTWQMAVAMAIGKVVAKFQKMKRTATGVAVWVNTLDVYKYLGAADITLQTAFGFKYLTNFLGADVVFVTSEVPQNVVIATPLNNMIAYYVDPGDSEFVKAGLGFTTDSETGFIGFHTEGTYSRMISDNYAIMGLRLFCEYLDAIAYISVGESDTQTLGTLSVTSEAGSEAGTTKLTVKEQLMSMRNCWKYKDTAAATAVTYGMDVKNWSKWDGESEIASTATHHITLVECDQNYKAVRSGDVAVTVNPGAMYKVIKHFIDLHDNDHSYNEGDIFPREGVDVSEERIKELAGSDNKQHTPLIELVEEDPDNTADTDTAEKPPKAGKKRSENKVPENKEPAEMIEDLKVLLGLPEEIDGALENKLLLILKATKQRLRFLLGGLEPPEEMNYIILDVSIIRFNRIGSEGLSSHSVEGESLSWSENDFAGYMDDIRAYLDDQKESKKGKVRFLMRYDTPIYFQKLTPGEYDPATGNYGEDTISEDMKSASVMDTGTNTMMLVYSGIKEGSLTIHLQNHYDRPFDRIRVGNKTYGVDFSRKLRTKQVYVVSEVMMGVKLIGFEKLEAKLTKNMDMSAVKTVVKKNGAEMQKKAMKEAPVLTHHLQKSIMLEITDGGMTAEVESTAEYAGYQEYGTRFMKGKPHIRPAFEEQKEKFKADMKELVRMDPQQELFSAVLMALKEKYKDTGVGVYDTDLPPEDTPYPFVYLADCSESDQATKNEIIGETNLTLKVWHDNIRQRGTVSGILADIKNICRSIEHTAHYAWNMRRPTQRILPDNTTKQPLLMGILEVAFKFSMKNRKLFGLQLFAEAVAGKKIVYLYRILSTEKDHDATALAFTTENERTKSKDADSTATKDGAVRTPGTAEGEITASSLLKKGDKFIDELEAALDDDEKMEIWEVNLAEPQASLSNKFKAKYFQGYLTEIDKTSNAEDNVELSLTFGLEGKGVDGYATVTAEQQEVAAYVFADTQKTGAMMELTINGTVYQFKFGMGFLREANKLTVVPVQGMPGTTKEIGARYLIASVVVDQEPNALVDLLDLANKGENPRVTKAMLDSYIDSEEVDIDELMEKTKDFLSKANATKKAVKEILKEYEEQMAKKKAQELMAEYELMMEALELRMLDESLHEHRQAFLNFAVKAEKKAGKGKTKPVYKRFRQFFDFDKELRKMKNRRKPSRFAGITKLLDREEMAESYSVKAILSAQDKNFSSIMKSCQGYANNLKTTLTGGLGFGAMAAIGGKAMSLVTNSVSDLSKETIETSDSMYKLQAAMRFSGYSEAEIQRIAGATGTLKTYADKTVFSLQDVMSTFGAFSANGIKDADKLTEAVGNAVAVFGGGAKEYSSVALAFSQAMAAGALHAQDWNQIINASPQLAGGLRKELIKLNPTLGNDFKGAMEKGAITADMLGQAINNIGMTDMAKEAATSVTTFEGAMSNLEASAVSGMMKLYDTFAKPKVIDAINGMTGKVEAGFDKLSVGIPKAIELISPYWNVLKTDAKEVGTAFGEAAGAIIDEVQELTGAFGKKESVDNFSESMGTATGALTTFADFLKDHDKEVAKAITLLPKLYVAFKGFKIVSAVAPGVKTFVGAIVSMTGKGIATLAGKLFGVAAGEKAVGTASKESSGTILESAKAFVAIGAGVALIAAGFSLLACSAAQIAQAGPLAAGVLIGMTVAVAGLMVVAKNVAPAMTAGATGFIAFGAAVLIAAAGIAILSLAAVNLANAGPLAIGCMVGMVAAIAGLALGAAALGPALTAGAVGLVAFGVAILLVSTGALLASVGLAIVAGVLPTIVQYGIQGAACIATLGAGMIVFGAGAAVAGAGCIVLGAGLVVVGAGLTVVGAAVLIAAAGVLLLAAGTLALGAGLTVAGAGLLVMGAAFPAVSSGALATVGALTALTALSLGLAAGMGASAVVVVAFGVAMAGGAVGTLAMVVALKSVNSSMKSIAGNAKSAQSSLTSMRASVNVVNSGLDALGSRAKSAVNTLVRQFSNAEGKARSSGNAVGNNFNNGVRSGMSRAVSTARTMSASTVVAMRSAGSGSYSCGVYIGAGLANGMASQVGRVRSVAAQLAAAAEAAIRAKAQIHSPSRVSDKLGSYFGIGWVNAILGKVKLARKAAAQLVQIPELATIPDIGMNIRTSIDDLNDDYEYTRNETYTIYIPVEVDGRQVAKATAKYTKEEIEQQQKRDLRKKGMRMYKFVDTTERQEEQILPSEALNFNGVYFENVIPGYRTLYVSGREMIETEITDLDTEIMDGSRYRRKRYKPRTITVGYQLIAKSNAEFRNAYNKLNSLLDVAEAKLIFLDEPDKYYVGTKVNAGDVPHGRNAVTAEIEFYCSDPFKYSVEEYEVAPTADDGTTFVVDYKGTYKAHPTFEAVMENGENGFVGFVDQDKHILQFGNIEEEDGETYKENETLATLQDFFNAPDDTSGTDFMHPFYGAKGSLGTSTWFNTKFLSLKSAGQQVGRANGGLRTIILPADSTGDQEGCQNFYSYFHILFYAGLMGQTGEMCINYLTADDKLIAGVNWYKSDMSGNTGRYDLVCYNPNKKSTDQQAGRVLKTYTYMTSHLRKQNPWYWNWGHCDLRKEGSKLTFFYNGSYPSFNIPEIADMKCAKIQIAIKQRGTRSGNKYLTYNGINAFYFQKLHVKKWRDVPNKFAQDCSLIANCSDGSIRMNGLPKPDLGALGNDWETFCLKPGVNQVQCLCSSWAKKPTFKMKYREVFLMIIYFADRAMNILGSASTGLPKGLMITNDKKTEEISEGVAIFECNLDYNFANPDEDEEQEVDVKKLAAVGNFILKQGADSSEAEVYTIIDSTIDPIKKDASIYAEDAGLDLLNEVVGAYAADKAYNIAYYINKFAYDSGFEIGINEVSNLTRKLSWDGEDTATKRLLSVATQFDNTEIGFSFKVENMAVTGKYINVYRNRGNDSGVTLTVGKEVSGFRIKSSIADLATAYRCTGGTPEGSENPITLNGYKYDDGDFYVEGSYVKSRKALEKWSRYQIKTEKNKNDVGHIVKSFTYNTTSKSELCNRAVSSLKKICDEAVTYEVELLYLPDGVKVGDTVSIVDDDDNIYLTARLLKLEMSESNDTKEAELGDYVRQGSGIDAKVMELAERFEKIAKNRNFYTWTAFADDENGTGISANAYGKDYLGIATNRLAKEADLSDPTQYTWVKIKGEQGIPGVSGKDGADGKTPYFHVKYSAVANPTSYSDMTETPDEYIGTYADYELDDSTDPKKYTWSKFRGDNGEDGADGIPGKNGENGETSYVHFAYATSADGKTGFSTTDTVGKTYMGQYADFEKADSEDPTKYRWSKFQGPQGPQGEQGPQGLQGLQGEKGEQGIPGPTGETGATGATGPQGPAGKDGTNGKTSYFHIKYSPVENPTSSQMSEIPNTYIGTYVDYTEQDSTDPSKYTWYRFQGLQGAQGTQGIPGTNGADGKTSYLHIKYSNDGGKTFTSNSGETVGDYIGQCTDFNRADPTTVGAYTWSKIKGETGAKGEKGDKGATGATGPQGPQGVKGDTGATGPQGPQGVKGNTGPQGPQGPQGQTGTAGKDGQMLYATCDTAAGTVAKVASLAAGSLSLKAGATVAVKFTYANTVSSPTLNIAGTGAKAMYIQGVRDVYWTDGATVTFTYDGINWRVASEPVYAPTATIGNAAGFNVFIDGTSVQVRKGTEELASFKGDEIRLGEGVDCAKVFIGDLEIGVDGAETYLRNLSTRISTKASHEGGSASVPSVVVNDTDTYVNGESMTALFTKVSNKANKAWTRLKNQATVGNSTITVDVSQYSEFLITCGLASSTNGNYYRELGSTIVPASVLTSHSGIDHGSGTHQAFYSSTYNGGISYLGSNKIKIYNNGGITRLYARMDSKNKEFYKKIGAYIWSFIKGKVWYSFLLLISSLYIWKYRFEINQLKELDVKNLIFILWIFLLAFPLFSEMEILGVKVKKEVKKATEEVKGSLKDIQSQITQLQLNNSVSNRISIENTPLPSEKRLEEMQKSVSDLHQNISESNADGSTEKSVFLFKTRLKIEVALREIYEKIGNEGYYNRVIGLGEMAKLLNQEKIISETLLGLIIEVSKITNRGVHGEIVSDEYIEFVKSVCPGIIQQLDEISKKIMYVDVNTIITVGSLLTAVVVIFSAVFAVYKWYLRQNEQDKEIERMKSEQCLLTYGILACLKGLKEQGCNGPVTEAIDKIQKHINKQAHDQEDMDISTIGTVVGIVAICYVIGLGCKAYKKIPDKWIPVIMAVCGGVLGVAGLYTMPDFPAGDVINAVAVGMASGLAATGVNQLYKQQCKMAHLFIIAGHGAGDSGAVGYGYTEAERVRALARRIVAYGGSNVTLGDTNRNWYADKGISSLKISKDWQILELHMDSGVSTAKGGHVIIKEGYNPDQYDTALANFIGSFFPGRANKVVGRAHLANVNRAATKGYSYRLLENGFITNQGDLNKFNSQIDELARGILKAFGISSAAPVASAKKTEPVDGEIKSGGVFQSKTDKFGTISYQAHMRSAGWGAWQSDGLMVGSTNQNRRIEALHIQPVGETDVVVHMKGIGNKEYKNIAKDTLIGTTGQNRRLEAIRVTGKESFYLYRVHQKSIGWSEWANNGEWAGTTGKGLQMEALEIKKSMFSVEPHVQSKGWLSPKAAENVIGITGHALRLEAIRINPYGKTIKAKAHIQSKGWVDYGMITKDTIIGTVGEKKRIECLCFEGDFEYRVHIQGSGWTDWTRADGVATLGTVGQELRIEAIQFRMNGTTPTTQDTPDKGRLQINLVSDISAYPIQGAQISIYYTGVPEAQLEQLTTDSSGQTDTIDLAAPPLEYSLNPENEVQPYSEYTMQITAEGFESVSIAGAEILADVTAIQNVSMKPIDNPENEETVFVIPAHTLYATYPPKIPEDEIQPTFESGEIVLSRVVVPEYIVVHDGSPRDSTAKNYYVKYKDYIKNVASSEIYATWPEDTIRANVLAIMSFTLNRVYTEFYRNRGYDFTITSSTAFDHKWIPERNIYDTISVIVDELFADYLSRPNVKQPILTQYCDGRQVQCPNWMTFLLMKRRCLRIYRKRRKKKLIILILTCILFLGTAAAERGGYLELEQFGSNKKQDIPYQKVSITEEENTEKYYYQQLPTEQRQVYQEILEGVRNHTEEIYVHNADVDETNQIFQKLMKDQPDIFWCDGTATATTHKGTESYTVLKPKYFYTAEESQKMQTAIMQAAEKWLADLDADADDYHKILYVYGKIVDEVEYDESAPDNQNIYSVFVNQKSVCAGYSKATQYLLERLGVFCTYVTGKTTEGGNHAWNLVKCNGDYYYVDTTWGDPVFQQEEGENTSQDAEQNSGQDAEASGNKANISYDYLCCDDTQLFQTHILDKDTQMPECSKMDCNYYVVNGMYYTQYDAKKVLEAMNQAIWAKKSATIFKFADTFVYSQAHDDIFQKELAKAVQNLADYYGVSQVKYQYIDDPRLHKIVIFWQYSMKKEKETQKGKGEYMKAFLILEDGTVFTGTSIGSTKDMISEIVFNTSMTGYLEVLTDPSYAGQAVVMTYPLIGNYGITPDMESRKAWPDGYIVRELSRMPSNFRCEGTLQDFLKEQDIPGIAGIDTRALTKILREKGTMNGMITTNENYNLDEILPKLKAYTVGDVVSKVTCDEKYVLEGNGPKVALMDFGAKKNIAKSLNERGCEVTVYPAGTKAEEIIAANPDGIMLSNGPGDPETCVSIIEEIKKLYNTDIPIFAICLGHQLMALANGAKTYKLKYGHRGGNHPVKDLTNNRVYISSQNHGYAVDGTTIDPAIAKEAFINVNDGTNEGLAYEGKNIFTVQFHPEACPGPQDSGYLFDRFMDMMKGAKMPRIKDIKKVLVIGSGPIIIGQAAEFDYAGTQACRSLKEEGLEVVLLNSNPATIMTDKDIADRVYIEPLTVEVVEQLILKEKPDSVLPTLGGQAALNLAMELDENGFLERNNVRLIGTTSETIKKAEDRLEFKMTMEKIGEPCAASKVVKDVQAGIEFAESIGYPVVLRPAYTLGGSGGGIADNRTELVEILENGLRLSRVGEVLVERCIAGWKEIEYEVMRDSNGNCITVCNMENLDPVGVHTGDSIVVAPSQTLSDKEYQMLRTSALNIISELNITGGCNVQYALNPDSFEYCVIEVNPRVSRSSALASKATGYPIAKVAAKIALGYTLDEIKNAVTKKTYASFEPMLDYCVVKIPRLPFDKFISAKRTLTTQMKATGEVMSICDNFEGALMKAIRSLEQHVDSLMSYDFSYLKGEELLEELKVVDDRRIWKIAEAIRQGISYEDIHRITKIDNWFIDKIAILVEMEQKLKTEELTAETLKEAKRLEFPDNVIAELTGKTEREIHDLRHDNGITASYKMVDTCAAEFAAETPYYYSVFGSENEVVETSGKKKVLVLGSGPIRIGQGIEFDFCSVHCTWAFAKEGYETIIVNNNPETVSTDFDIADKLYFEPLTPEDVESIVDLEKPDGAVVQFGGQTAIKLTESLMKMGVPILGTSAENVDAAEDRELFDEILEQCEIPRPTGGTVFTAEEAKKVANRLGYPVLVRPSYVLGGQGMQIAINDHDIDEFIGIINRIAQDHPILVDKYLQGKEIEVDAVCDGEDILIPGIMEHIERAGIHSGDSISVYPAQSISQKTKETIAEYTRRLAKSLHVIGLINIQFIVCGEDVYVIEVNPRSSRTVPYISKVTGIPIVPLATKVIIGHKIKELGYTPGLQPEADYFAIKMPVFSFEKIRGADISLGPEMKSTGECLGIAKTFDEALYKAFIGAGVKLPKHKNMIMTVRDEDKEEAVEIGRRFEKIGYKIFATEGTAKVLTDAGVKAMTVNKIEQESPNLMDLILGHKIDLVIDTPPQGADHSRDGFVIRRNAIETGVNVLTAIDTAKALITSLENTDIQKLTLIDIAKIKMNSLEQEVLARNFVKIGSGYYWTPYIIMIAAVICIPVFLIVTVVSYCKREAMLKAKRLKSMFVLYSACAVMATGFTSQAASEQPEVTTITETKGENTNTHTAVQAISQNIVASAQEMTDASQQVIADNIAKKEEEERLAREKAEQEAKEKAEREAREAYVRANQELLASIIYCEAGNQPYEGQVAVGAVIMNRVKSGSYPNSIEEVIYQSGQFGPAATGWLNRVRSSKGYSQTALQAAVDALNGSNPIGNCLYFDQGGAGMKIGAHYFHMYKILIVEDDETIAGGLKNHLEKWNYQAECMTDFKDVMGKFVEFEPQLVLLDIVLPFFNGFHWCQEIRKISKVPIIFLSSANDNMNIVMAMNMGGDEFIEKPFDLNVVTAKVQAVLRRTYEFRGTADVMEWNGAILNLADATVLYQDQKLELSKNEFKILQILLENTGKIVSRESIMTRLWDSNEFIDDNTLTVNVARLRKKMEQIGLGGKIITKKGIGYMVEAMKLLIAFFKDKTREISLYAGTVGIFIVVAFLYNIRMDALKYALLLVILWLLLYVITEYHRFRKKHLLLERFKKSTQECTKELPECRNLLELDYQELLGIFDEKILELKSEARIKGQDLSDYYGMWVHQIKTPIAAMHILLQSVEDENPALPELKEMKMELFKMEQYVEMVLTYLRMEDMSGDLQFEKVSLDKILKQSVRKYSQMFILQKIRLDYRPVERIVLTDEKWLEFVTEQILSNALKYTKNGGEIRICLEEKRGRECLVIEDNGIGIQAEDLPRVFEKGFTGYNGRADKKSTGIGLYLCKKIMDKMGHKIWIDSEVGKGTRVYLELTRKEWNPEMSHASMAGYFLFFYNRYRKEEILKRKEEKLMSLLEVKNVKKIYTTRFGSNQVEALRDVNFTVERGEYVAIMGESGSGKTTLLNILAALDKPTEGKVYLKDRDLGKLKEKEIATFRRQNLGFVFQDFNLLDTFSLKDNIFLPLVLSGKKYPEMEKRLKPIAEKLGIEKLLEKYPYEVSGGQKQRAAIARALITKPQLILADEPSGALDSKAADSLMNLFTTINQEGQTIVMVTHSVKAASSAKRVLFIKDGKVFHQLYRGNLTNEEMYERISDTLKILTTGGEEDEMNNFIYEKLAVTNLKNNRKTYVPYIFTGVLTVMMFYIIDALSKGEGITQNTLKICLQYATGVIIVFAVIFLFYTNSFLIKRRKKEIGVYNILGMGKRHIARMMAVETILTAGISILGGLVFGIIFGKLMYLLLLKILHNSVDMQFSVNGTAIVQTVILFAGIFLLTYLYNILQIQLVNPVELLHGGNQGEKEPKSRWLLVIVGVAALGNGYWIALTTEAPLEALLKFFVAVVCVIIGTYALFIAGSIVVLKILRKNKAYYYNPKHFTSVSGMIYRMKQNGAGLANICVLSTMVLVMVSTTVSLYAGMEDILDSRFPRDVSIVCNEADTNNEETLQRLIKEQCEKAGVKITDRVRYRYGSMNAVLKGNNLEKVEQYYPDNHFYYVEMITQEEYNRIEKQNVSLKEQEILTYTTNGKCGKKQINIAGQNYQVKKELSEMTSQPKSTAEMYKTLYIVFANAEQIERIESFSYADKFNLKGDDGKQKETLEQIQNEFYEKFPDGTMESRMLSRSSFYELYGGLFFIGIYLGSMFIMATVLIIYYKQISEGYDDRERYQIMQKVGMSKKEVKRSIRSQVLSVFFLPLVVAAIHVAVAFKVMTKILGVLNLTNVSLFAVCTIITIAVFAVFYIIVYSITAKEYYRIVNMTREGERELVKVEHVNGGDGYIVREAMVTSEEVGEACKMYAKIHLDPGCEVGYHYHHGETESYFILTGHGTYDDNGEKQPANPGDLFLCKDGDAHGIKNTGDEELTFMALILKKMKKKPEFHGSDLEKIADYYHLDKEKIVLFGANVNPLGLSGQVKKDLAEHLDIISSYPDRDYTDLKKAIAAYTNTSPEHIVVGNGSTELISLLISQRAPKRALLLGPTYSEYARELNLVGGTLEYYNLKEEQDFRLDISDLTDTLKSDIDLLIICNPNNPTSSAISTADMKKLLTVCRSLGIFVMIDETYIEFAPEGTSLSAVSLVPEFDNFMVIRGVSKFFAAPGLRFGYGLTSNQAFLQTLLTHQNPWSLNSIGAYAGERMLKDTDYIQKTWSLIDSERTRMCTELSGLDTVKIYPAYANFVLVKILKEGLTSFDVFEKAIHQNLMIRDCSSFESLNGEYVRFCIMNPEDNDRLLDVFRSLMKNKIQKFSKGDFQLIRPDVIFDETNLVLIIGEGEVYRGSFTMRANNEGRIRGLVYSSSFRVHFKDQGFEGNPSRVEFTYDGRGLRPGHVEEGKFTIVCMKEQSKKTVAKKKFFKMVFSRAGIFVILILIQLLVFLGIPYYLKEYATFIYSAMSVMEIVVLVYIINTEGNPAFKMTWMLCVMALPVIGTVFYIYVHLQLETRFVQNRLAALRMETEPYMDQDEKVTEALWASKSAMAKWSKKLLGLAAIGSAAAGLVYYLKKSKKDEDDDFNDDFEDEDFDLDNDLQPVDRGYVDLNAAKTTTEEDNAADDSTEDTSADNTEDTSEDADAKDTPDTSEDTDEDDGDDEDMNELTINLDSRSKKPLYEQIYDYIKSDIQNGRIPYGEKLPSTRALAKHLEVSRSTVELAYEQLLSEGYIESAPYRGFFVAQIDELYQLKKEEKKSERKIEKKKVYQYDFTPNGVDLNSFPYNVWRKLSKDILMDDRTELFRTGDPQGEYGFRSAISNYLYQARGVDCTPDQVLIGAGSDYILMLLGMILGTEHMIAFEDPTYKQAYRVIHTLGYETVPVAMDRHGMKIQDLESTGADIAYVTPSHQYPTGIVMPIGRRMELLKWAYEKDGRYIIEDDYDSEFRYKGKPIPALQGYDAEDKVIYLGTFSKSIAPAIRLSYMVLPKDILKAYRKKGSFVNSTVSKVDQTIVQHFIEEGYYERHLNKTRALYKNRHDVLIEALKPLGDICEISGEHAGVHILLTFKNGQKERNLIEKAKKADIRVYGLSDYRIRKEEKEKATILLGYANMREEDIKEAVAILNQCWRKMGEETTVSKNFIEQEIDKDLAEGVYSEVCTRFPPEPNGYLHIGHAKSILLNSGLAKKYNGTFHLRFDDTNPMKEDMEFVESIKEDVKWLGADWGDHLYFASNYFDQMYECAVKLIKKGKAFVCDLTAEEMREYRGTLTEPGKNSPYRDRSVEENLRLFEEMKDGKYQDGEKVLRAKIDMASPNINMRDPIIYRVAHMTHHNTGDKWCIYPMYDFAHPIEDAIEHITHSICTLEFEDHRPLYDWVVKECEFDPAPRQIEFSKLYLTNVVTGKRYIKKLVMDGIVDGWDDPRLVSIAALRRRGFTPESIKMFVEMCGVSKSQSSVDYAMLEYCIREDLKMKKPRMMAVLDPIKLVIDNYPEEEVEYLDVENNLENPELGMRKVPFGRELYIERNDFMIEPPKKYFRLFPGNEVRLMHAYFVKCVSYETDAEGNVTVVHCTYDPETKCGTGFTGRKVKGTIHWVSAPQAKKAEVRLYENLIDEEKGVYNKEDGSLNLNPNSLQILKECYVEDSFNEAGPCDSFQFVRNGYFCIDSKDSTPENLVFNRIVSLKSSFKLPKKMKKMKTMTEGVIWKEILFFAIPLILGNLFQQLYNTVDSIIVGNYVGSNALAAVGSSGAIINLLIGFCIGASTGAGVVISQFYGAKNTEGVRKAVHTTMAIALVAGVLLTVIGITVTPSMLRLMGTPDKVFEQSVIYLQVYFGGSLFSVVYNMSAGVLNAVGNSRRSLVYLMIAAISNIFLDLIMVVGLKLGIVGAALATDISQLISCIFIWGFLIRSEDVYKLKIKEIRCYDHLLSKIIRIGIPTGIQNIVISLSNLIVQTSVNSFGATVMAGFAAYIKIDGFNILPVLSISMAATTFAGQNIGARKPDRVRKGMYISTVMGAGYSVLTGIMLLIFAPQVIGVFTTNQKVVEYGVYIMRYFCPFYWMLGILHVLGGTIRGTGKTMQAMVVFLVSLCGFRVMWIAGTMAWTRSLGHVMMCYPTSWLLGMLLMLLYVWKGKWMDLMNQVILSIHFLVIPGENQKKYKENILPENENRNRIVIMNMMRCFQGDRKMKHGKKCKIDKYTLILIVLLLLLTGLVIAWKLPQKEDRYIHVGIAVYDRSDTFMESYIRELEDKIGQTKILGKKVSYEIYDAEGIGSRQEKQLQEMYAQDYDVMLVNLVEPASAASVLTDAKDADIPVILFNREIDEKDLKISKNVWYVGTDARAAGVMQGELLKDLWKKQSRILDWNGNGMLDYVLVEGEESHFDAIRRTSGFLETGAELPLNQKGNILAEWKRKLAYEKFAALDDEAVQNVEAVICNNDDMALGVYDYYKEKNLKLPVIIGINNSEEMHQKIMSGEMYGTIDNKMEDQVMEICRLMQAILKKDTGSYQKVWYSTPKAIVKAEGTEMGNNSKSSVVYQGKIPGRVKYTFAFGALGKDLIYGMIVDNTRSRFGKFVPWLVIGTLINAFVFVTVFTDFHLTGVKLCVFATVVYILWGMTYTIMDIPYWSVIPNLTSDPQEREKVSVLPRIFASIGQSLIIAGFGVQIIKGLGGDYTGYHRFALIIAATFIFTMAVCVINLPKIQHDVEEKDKMKFKDLFTVIKKNDQLRWAVLLILLYNVAIQAIMGVATYYFSYVCNNAGMLSAFMISASVAEVVGLLIFPKVTKVLSRKKAFLMACVLPPIGLILLLIVGIACPNNIALTAVAGVIVKTGTGLELTGYVPNAVQSLATQNSIRVLMCIVPTIGVILAYIVYKNKYKLSEEYLSEAGKTGWKAEKGLDEMCADTWRWQSQNPNGYEKMNVVDTVKNAAFASAIQAALNYMDKDPETNIPKVMSIVDKAAPEGWYESQRNAIRQGIAEKGNWYQLAQKVWELDPGVRKTFFTNFIVNASLKGSALQKETEEKEDCNVPWAILLDPTSACNLHCTGCWAAEYGHKLNLSLETIDDIVTQGKKLGTYMYIYTGGEPMVRKKDIITICERHPDCEFLSFTNGTLIDEEFCQEMLRVKNFVPAISLEGFETANDGRRGPGVFDKVKHAMQLLKEHNLPFGISTCYTSMNYKDITSEEFYDMIIEAGALFIWFFHYMPVGNDAAPELMPNPEQRKAVYERIRAFRSSKPIFSLDFQNDAEYIGGCIAGGRYYLHINAAGDVDPCVFIHYSNANIHEVSLLDALKSPIFQAYRKGQPFNDNMLRPCPMLENPECLPKMVKETGAHSTDPQSPEDVQHLCDKCKPYAEAWTKMADKLWVERQTAKKMYSHCLVLWPLFCFPAAARFESGTYYSIDEASRALVEKLEHYAASLVYGDETTTDISLNGHTLSDSGNEDSNCKNMEMLSIEKELQGNSYPGRGIIIGKSADGTKAVTAYFIMGRSENSRNRVFVEEGEGIRTQAFDPSKLTDPSLIIYAPVRVLGNKTIVTNGDQTDTIYEGMDKQLTFEQSLRSREFEPDGPNYTPRISGVMHIENGTFNYAMSILKSNNGNPESCNRYTFAYENPAAGEGHFIHTYKCDGNPLPSFEGEPKLIAIPDDMDAFADSLWNSLNADNKVSLFVRYIDIATGTYETKIINKNQMNELELKYGCNPNQKPSRIYMEDGSELPIKVLNGRPGYINFLDAFNGWQLVSELKKATGLPAATSFKHVSPAGAAVGLPLSDTLAKIYWVDDLGELSPLASAYARARGADRMSSFGDFISLSDVCDVDTAKLIKREVSDGVIAPGYEPEALEILKAKKKGNYNVIQIDPDYVPAPIEHKQVFGVTFEQGRNELKIDDDFFSNIVTENKELTEQAKIDLAISMITLKYTQSNSVCFVKDGQAIGIGAGQQSRIHCTRLAGGKADNWWLRQSPQVMNLPFVDGIRRADRDNAIDLYMGDDYMDVLADDAWPAIFKEKPEVFTREAKREWLDKLTDVALGSDAFFPFGDNIERAHKSGVKYIAQPGGSVRDDNVIATCNKYDMVMSFTGIRLFHHMQLSTMELLIVSVGLSIDVFVAVAYMGAGFSKIRWKNLVFLSVLFGGIQLGVLVLGNLITLLPLLSITRTKTAADRWEGLTVLIFAALGIYMILKGIRKKKVLERRKDEIEWKKTTFLALITSVDAFFVGMGLGFLDTAMIEESLVLFPVTVLEAVIGIFAGYRLGLKENRRAYWVGGALLLLASFDVILHYYTMERKSELTKALLGEKFKELVAKKGFEKLTIKIITDAAGVIRPTFYNYFQDKYEVMEWLLWEDVFKEVSELMEQEHVMESLQLLFQRFGEDKTYYEKVFEVTGQNSFEEMLYGQVFHMEEILVKHHPLKHLRNMPHVDEKVFLEFHAISLVNGLKYWLIRESKNISAGDAMEFYQYMMSHSILDLLDIENTEKKMKEHLKNFALLTGSTLIMAVGIYFFKFANNFTFGGITGFAVLVAKFTPLSASDFSFIANMLLLIIGLFVLGKKFAAQTAYSSILLSVTLSGLERIYPMSHPLTNEPLLELIFAIVLPAIGSAILFNIGASSGGTDVIAMILKKYTSVDIGKGLLASDILFTIAGFFVFDIKTGLYSLLGLTMRSTLIDSLIESLNRSKYFHVVCSEPEPICEFIKNDLKRGATIVLAQGAFTGDDKYIILTVLSPNEAIKLRNFIKAHTTGAFLLISNTSEIIGKGFHSVMKLFWQKAEVQKFEHAKDFAEEYNIGKNDFILASKSTYETYFAPLGLEAHVEFKSKYGKGEPTDVMIDALLADFRKTDCDRIIAIGGGAVIDMAKILVLAGNYTAEEIFGRKVPLKREKTLIAVPTTCGAGSEVSNVSIAEFTKLHTKMGLAVDEIYADRAVLIPELLTGLPYSFFSTSAIDAFIHAIESYVSPKATLYTQMFSMKAMEMIIEGFRKIAEHGEEYRMNLLDDFLTASNLAGIAFGNAGTGAVHAMSYPLSGVYHVTHGEANYQFLTAVFAKYQELDPNGRIKKLNNFLSNILKCKSDEVYTKIEKLLDQIIARKPLHEYGMKEEEIESFAKTVEETQQRLLNQSYVKLTWQQMAEIYKELYMYKYLPITDVYAREILDSRGNPTIEVEVLAGDEFCGRASVPSGASTGKYEAVELRDKEERYGGLGVQQAADHVNARIAPEVIGMNVLDQAAIDQAMVRLDGTKNKSNLGANAMLGVSLAAARAAAGALGLPLYSYLGGTNVKKLPVPMMNIMNGGRHADNTIDIQEFMIMPVGAKDFKTGLQMCAEVYHELKRVLKTLEYSTAVGDEGGFAPDLHNADEVLRLMVKAVEKAGYKPGEEIAIALDVAASELYDKNFKKYVFDGEAKKKGYKIVRSAEELIDYYEDIIEKYPIVSIEDPLDEDDWEGWKTLTDRLGERVQLVGDDLFVTNTRRLAKGIRRKAANAILIKVNQIGTLTESFEAVKMAQNAGYKTVISHRSGETADSFIADIAVAADAGQIKTGAPCRSERVEKYNQLLRIEERLGDVAVYQNPFEEKIENVQIMDILKIVLMIIFAIDCIALTVIVLMQEGKSAGLGAISGIADTYWGQNKGRSMEGALVKSTKFLAILFIVLAAVLNLKVFAMSKKFDKRKKVVYDLICDDLYTPMKFKELAMLLRVAKEDRDELRQILEALEQEGKIYLSKRGKYCRGHAKRLTGVFRASLKGFGFVVLDEGDSEDVFIGADDTCGAFDGDHVEIVLTKEPEGRSREGKIVKILERGLSKVVGLYRMKPGKKFGFVIPDNQRLDQDIFVPIEKSRGAVDGHKVVVELTSYGENGKKPEGKIVEIIGHLNDPGTDIMSIVKGYNLPVEFPDKVLRQAERVAKPVSEADMNGRKDLRDWQMVTIDGEDAKDLDDAVSLVKEGENYILGVHIADVTNYVQENSALDREALERGTSVYLVDRVIPMLPHTLSNGMCSLNAGEDRLALSCIMTVDPSGDVIAHEIAETVIHVDRRMSYTSVKKILTDHDEAEILEYKELVPMFERMQELSGILRARRKKRGSIDFDFPETKMILDENGKPIDIKPYDRNVATKIIEDFMLLANETVAEDYYWQELPFVYRTHEAPDEEKIRTLATFINNFGYSMHIGVNEIRPKEIQKLLTKVEDTPEEAMISRLALRSMKQAKYTAENDGHFGLAANYYTHFTSPIRRYPDLQIHRIIKDNLRGRMNESKIEHYQSILPEVAKRSSEMERRADEAERETIKLKKVEYMQAHIGEEFDGVISGITKWGMYVELPNTIEGLVHVTNMTDDHYEYNEERYEMIGMHTRKVYKLGEALRVQVLDADRLMRTIDFKIVNQGGAGDGEEMAKSNDKMVANNKKAYHDYFILDKIETGIALHGTEVKSLRMGKCSIKESFIRIENGEVFIYGMHISPYEKGNIFNKDPLRVRKLLLHKSEINKLIGKTKEKGMAIVPLKVYFKGSLVKVEIGLAKGKKLYDKRQDIAKKDQRREAERDFKMKLRMVPTKKEELRNLVTQTTLETYEELTPHLVQLINETNRNPELTEAQKQDEISLHMMGFVKSCTNEIIIEVLGEILGLEMTKEVLSAIQDAVGTQVFGIWFLIGAAFVFFMQAGFAMVEAGFTRAKNAGNIIMKNLMDFCIGTCVFIPLGFGILLGEDALGGFIGTPTLGIFTDYANFDWSNFVFNLVFCATTATIVSGAMAERTKFLSYCIYSAVISAVVYPIEAHWIWGGGWLASLGFHDFAGSCAIHMVGGTTAFIGAALEGARIGKFTRDKDGKVTKVHAFPGHNIVIGALGCFILWFGWYGFNGAAATTGPQLASIFMATTIAPAIATVVCMIFTWLRYGKPDVSMCLNASLAGLVAITAPCDVVDATGAIIIGVVAGLLVVFGVWFCDNVAHVDDPVGAVAVHCLNGIWGTIAVGLFATKTAPECTLKGLFYGGGFHQLGLQLLGVVTVMAWTIITMTIVFKIIDKTVGLRVTEEEEIVGLDVKEHGLASAYAGFSLMDITEGSMSINENTELGENDYDEASEAQRAASVKVTAPVDPETGIHKVVIIAKLSRYEKLKTALNDLGVTGMTVTQVMGCGVQKGAGEKYRGVEMDVTVLPKVKVEVIVGSIPVDKVIETVKRTLYTGHVGDGKIFVYNVQKVVKVRTGEEDYDALKDVEMSRGKKLKRKVTSLALTTAMAVSMLGVLPESTVEAAASDDDSISNGSLTAAIGDLGEISRLTIDNNRKNSSGKDVNFVLPNDTNQQNNEAHQWMGEMIFSYRSSKDGNFPEDNSGFQEVDTNKTLAAGGSTTYSNASANLKNNPYIEKKVSKDKVEVTFKGQDEDSTDSRTMKGFNAKSVYDMDTDDGSLLWSITLENTSGNYLEFGDVGLPMPWNNKYASIDDTYNNRTTVHTFAGADSGYAYAIRCSGEGNYVMFTPVTDTGARIEYIDNWTGNINGVKGTRSGSTYQNWTSDTGGWFPGLQVYYIHSKDIQKTGRGYYTDATSLVLKPGEKKTYQFKFSAVRAGDNTPQNSAEDANNASDSVEERENNMRSILYKEGMIDAVATPGFQTAINMPTKLDLHYDDSKISDVSVDIQCVHENDPWDEEHIPDQQSGMVNNSKSIEHSDSDSAKLVNTKTVDGEKHHIYELNFGCIGNNSVRVNYKLNGEDKFTQYEFNVLDKLDSTIETHSDFVANQTQDNDTSSPTYGIYSDWYFASGKDSTQQSHWGDDWSHDNINFMAMKNYLDPNASEVESIEKYLIDFMWNNYMKNSHETYAVANYLSGSGIYGGSANPYSRTYSEVMEATGFFNMYRIEKAYPDLIDYRESAEWYLEKAYGIYSNRVSAYPIGFYGEQQIPDMIEALYAEGMTEEGDNLKQLFAKSKGTSMATAAYPYGSEFEYDNTGEEGAYSAAKALRTYYPDNSNTKAALKNMQSAEWKTRAMRGLQPTWYQYADPVFRGGETWWNFQYTASLAGYIMDDWLRYEDTDADTDSSAWAERMNYAAKLSNFNAVNMGQISSNYIGNTSWRYTMSKGGYGAQNVNDGGTRVQNNGWNDFSGESDEGLYGSLLSISADVATDPVFGLTGYGSTVSKSGGKYTITPLDGVGKRINVIDDKLYVELEQDSCTKAVIDKDGTYFDLAVKNLTGDEHLSKISLSGAGLKNGYYSIKVNGEEKEQCYVSDNQGDAYAVIPAGESAKITIEAMKGGENQAPKIYKIKTSENPQALVSSRIEAQAYDDGAPDGKLTYKWETVKEPEDGELTFDAKNKPYANITASKDGIYKVKLTVSDGELSTEKEVEIEIGRAPEKTAPVIESATATQHPTNTTTAELSGKASTDKTYGNKVEYKWSVVDQPEGGNAIIANAEKADAKLKAYVPGTYTLRLTATDKKSTEYDADVESTKDIVLEMKEPVDGIERAGTVLTKVKTEPELPEKMEVIYEDGTIKDSEIVWDQVDEESYAHAGNFTVNGTVKDTDLKVEVTVMVVSGEAQNVALIATPSAIIDTPEDLGGVAGLNDGYDPASSNDKSHGVWHNWLGDNGADAWVQYDWESEVTIYQSDAYYFTDGNFVPKSVSYQYKDANGNWRDLPNVSGCGTELNKYNTTTFAPVTTTAIRMNMSPKTQGCGVIEWKVYGYAENVIDKTLLKKTIDSANALDLTKYELTEEDKAALTEAIQEAVTVNDNKEATQEEVDFAAAKLARIMSSLPTADGNLAYGAAVSTSYVSSWEKVSAVNDGKIPESSYNPSGMARYGTWGNASSKETVTYTWNQEMKLTGADIYLWYDGDTEGDYTKGGIKIPKSYTYEYLDSEGNWKEVPNPSSYGMEMDKFNNTTFDEITTKSIRVTLNKQANDTNGVGVMEWKVYGTAKYADENDKADLEKAVKDAETEEANLYTEDSYKAFEAALKTAKSVLESEKVSSGEVKAALAALVKAQNNLVKKAEDKNIAPKAAVDGICNYTTDLGGLAQLNNNIDPSSSRDWDGSQVDAGKGMWHNWNNRYDADGNVVNAWVSYTWDSEMVLESTDVYYGTDGGGIQPPKSVKFEYLNEAGEWKEVPNAEGLGCEKDKYNTTKLGNIKTKAIRMVMEPEFLSDADPAHGIGVLEWKVNGTKAADLTALKAAIQEAEGKNESDYTASSWKTFAKALEEAKAAAADNTVTQEAADLARTNLLKAANALVKKGEKPEYDNIAPEAKADGICDYTNDLGGLATLNDGYEPTESHDTSHGAWHNWNNRYENGVAKNAWVSYTWDKPVEINSMDIYYFSDHGGIVAPKSASFEYLNDAGEWVVADEAQGLACVEDEYNTVKLANIKTKAIRMTMEPEFMNEGDPAHGVGVIEWKVYGKYAEDKPETVDKTALDAVIREAESRAEKDYTSDSWETFARVLESAKAVQKNESATQEEVDMALSFGPFFTCFIVTLFLTVYLHIIMHHTSVFHKRTIQFSLIGILVILIRMSIPFNFPFTYSFQSYQVLPRILDFTTQNIAGCRLRVDTLIFSIWFTVAFILLLRLLVQYIRLHHALSAFFVEKEGAYAYLYEFLQEYLAKPIRIALIPEPISPAITGLLHPILIMPDGQSFSETELKYICLHEIAHYKEHHLWLGFLMEIICRIHWWNPFVQHLKKEFMLFLELSNDFFLIQSNPKFSVTDYAELIVKTAKRIQSARLAEPSRMMHFAVNDTSVLSTRIYFILNNQENTSRFKRVHGYLCHTAIFAVVIFSVFCVPEPNFRELYPVTDGAVELREDNAYIIDHGTKQYTIYYEGRFFADIDHLSEDLKRLPRYKEGEPIHENDMKKRFTKKQLDVMKVLWESATPMIASDIVRKDDALNINTVQACLRSLIANHSIKVADIVYSGTVLTRSYAPVISRDEYFGNTCTDILGDGQKSALIASLIDTETDLDELEHLEEMIAQRKHILINGGNMGNFKDFDLDLKNVASGGEAEPNGLSKITTKITIGVSKMSLKNKCKSVDTPTTGRSAICCKRTNAAAEPQCIMETILFSKTDKIKIVTFVAVAFGLPWLLLPQIRVEGILAYNIPASYMMILPTFGIILGRIICERKIHGWFHWIYTIAFIESTAVMVLCAAKVITGKAADDMLTVSSMALSIVLLLGRMIDEQELYPFKDLKKAIGIYIMFVAIAQISNLPQLIHAGALRTADEIVSNLLFAPIDIFVVQSIYFFGEEYAWRGCLQGRLQNIFGKRMGVILLGIIWELWHMPLWFQISEPGQGKLIVLLVLMRMPYVIALAVFLGWAYMKTNNIWLCVLIHGVNNAAGAAFDSDLVTVADTVESVSVFDGIMTAVAVIVMLLFLFTKEYRKGERVMKVVGYAGSRSAFSKSICLGEKLKTMLREKNIEMELYTARNNVVEECRGCGKCFDEGLCPQDQEDSMEYIRKKILEADLIVLLSPVYLNNVSGAMKTFLDRIGSWVHTLALSGKMGLMTVTDQSGQEFVSYYLQKLLLQMGCNVVGEYKVVALEELDQEEVIERIVSNIVKAFSDQEQYISTADLENTFQYLKARFVNADMEQYKDESYEIKYWYDSGMAECETFQEVLNLRKLQCRSDVHEVMKSEVKEEIQTYIRYINENDFRDKCEEYIQMFFFLSQMMLEESLGADERVIQSMAQKMVGLLGQDLDIDFASPNDGMYGGLGVLTFSAHEIMGRTGELKETSELLDRFLLDQACQKADLFQQRKLSFGSYDILGGIAGVVYYLLDCEEILNQPEEKLKLRDLIRFLIYLSGDYSYWGKQILRYHIRRRQQFLAIERKTMKQGHINFGMAHGVAGPLVALAKAKRQGIQEMYLEEAIWKLFGLYEELCVENNGIVRYPRRLPIDCYVSKTSADLTENAGWCYGNLGIVRSLMKTAKYLRKPMEYAYYLDKLVDILAQPAKEYNLSSPIVCYGYGSVISIQKYAFLESQDERCLVNLERNVEITLKEHRKKMQDEGYRKDFSIMLLVLAAIYIGIDLFQMLIEYFLDYYKYTFAQEYNLHLNQVMIKKSLEAYFFTLKNKIVFCKKQFQNMSVFCFVSTEIVMTEKQGFMTALYERLSRDDELNGESNSISNQKKLLEQYAKEHGFTNLVHFTDDGISGTRFDRPGFLAMMKEVESGKVGTILIKDMSRMGRDYLKVGQYMELLRQKNVRLIAVNENVDSFREDDGFTPFRNIIMNGMQGIPVKRMASTTPYGYLKDKDDPNVWIVDEEAAVVVRRIFHMTMDGYGPYQIAKALKEAKVEIPAVHMAKKDAGLWKGRVEEIKDPYGWGSSTVAGILKKREYLGHTVNFKTRKHFKDKKSHYVSEDNWTVFENTQEAIIDQETFDNVQRIRSNVRRYPDGWGEAHPLTGLMYCADCGSKMYVHRVNNGKRVPQYTCSAYSKVPVGTLCQTQHRINADVVMELIKELLKAVAEYSQLNREEFLETVKKAQTSQQSSEITRLKSRLAEAKKRVQELEKLICRIYEDSILGKLPDERYAILDGQYSKEQKDLSAEIADLEAELSGYEEGRRSAEKFIALVDKYQNFEESTTYMLNEFVEKIMVHERDRKGSIETTQEVEIYFNFIGKYLPPHFGEVEMTPEEIEEMKKREARKDRLHQNYLKRKANGKQQEYYERTKAKKKAEMDAKKEEIRQEDIAKGVFVPVSLLPPAEPKKGVASAMSELERIIHDDSNGLDYILVGEIYLPLIAVPEEKREIGFYGSLHRNYLKDYKSGLYSYLTLTGKLWTYLADLNEQCVERRDFLMEQIMEQEGITEELKSRDQMEWVRRANNARSRVDEIILNELVYVMRYRIEYADGRCCNFANSRKDLLDWLKALKDEKVVDIRKVYKNGVTDSVIDSYRSYLKQMKLQKIFQKLSAKQKTIVFDYMTDTSNKCSDLNEFYYRMGLRDGLRLEEVIMSYTYAKYALHNNSQANYAFYGLPNSTKMHLINKANQMQAMGGIPSGYAVYYFNTSYNHQPMAFQVNNVATLSLRKSSSNTDITNGNSCYSLANAKYGVYSNAACTSQVSTFTTNANGTSNSINLEPGTYYVKEISAPEGYYIDNTVKTVSLSSGENKVVSFTDKPMDDPAAIVIQKKDKYTGNTIKGKKTLAGAQFTIKYYDGFYDRNNLPARATRTWVIETKERTRPNGSKVYQAGLSDTYKVGGDNFYKVDGAITIPRGTITIQETKAPDGYRNDLNMTDTKGNSTVNGVYLAQVTKPGDLSTLMGGQTFEGSDSPVRADIKLTKINGTNNNTMANIPFKITNLETKESHTIYTGSNGVYDSSLIKKSMNTNTDKAGAGVWFGDTSILSDDEGSFEYGSYSIEELECKENDGKILYKGTFKIDNNTGSTLDLGKIINNNIEVKTYAADNTSGNNNTAFIQQGGIFNYTTGQLTYGKAITDEVNVKGISSGYAVANLVDMETGEYIKNKDGSTVQSEAKIEPYNDGTYTGQAHQNLVYDNPESMLGKNIVVFEKIYALNADGTPNYNKLLVEHLTDMSKATYFNGMFGRMSNITSINLSGWSTSNVTDTTNMFTECRKLKTIYVSEGWSVAKVKSDTNMFSNCTSIRGGSGKTYNQNQWGKSMANYSNGYLTYKAYTAKANIAAPSSSVIISSAKATDGLTVEEILNNDSAFTDPIRAVNEESTDAENEDADTQNADVAVQSMDDPSGKLLYSHSDLNDENETCHKDINDANQTIKVKGYRDCTVIKRIKADDYWKEHGDPTFIFKLTGTDTLGASHTYYQSVTFTESYVKAHTDSDGYVEMKAIFGQVPAGEYTCSEESVSRFEFESLTKPVNATINGKTAVYHLTDNDTACATFTNKKYEEGDFGHDSVVVNHFNHKTQDMSKKEKLIQKLKAQSKSFSYEDAKVLLEYLDFLESNKGKTSGSRVVFTNKLHGNIMLHKPHPQKELKKYQIKQLKEFLEQEDLIMSSVMKYKDYIGSVEFSEEDQLFYGKVLGIHSLISYEGESAKELIQDFHEAVDDYLELCVEKRIEPEKAYRYKGVHAISIYPTKMKKIFFETLKHKFGHYLLVILCGILMVSTIYVSYAFSDSIEGIIHGQNSGIVEEMYTFINFQETYILLFILMVLVIISYIQKKSYDYVLLDTMGLKKKHRYMFIGFEYAGIIFSSVTGGLILGKILAECAKTVLQNIFYNTITTEVNYGFIALRNTLVISCEVFGILFIVFDELIACLGMDALLTVGKKNGKPLKKRPKTLLIGIFLILIGLISLLFYWGKISQSIPTVFLNAGMCLLMISLAGYYFVRLNKKEKKYYKRITWLENWYHRFFYNINMSFVVAAFLVIIMTDFSIKLLDNLPITEPKNYPFDLVWMANTDDEEFLNHLTDDEGVELRKVPCARVTTTDIAEHMGIPASTYEKWTGKSLDLKDNEIFVVYQRERFERNKVGIGYNTKNPLIYIGKARADLWLYIKGVAAPKVQYFTEKFKVVGTEDRILTGVFGSETCEHIIVFSDEYYQKNCVKADGANMAVMMNIPENYDKVVEEIKAYAQDHSQVNYFDADNGNLIYEKKELLLERSKTKLLYVASAAGNIIIMLLCGIFVLSIKMECDFPETEWKYRFYIQSGMSSAKVRKGIIKECLLSGGLPVICGTIISILYCSMLLYAKHLQIEWVHRYFKGIILIVGAIWLLFAVFIFIFAYRNIRKIEGDSGNGKKMEKSKKILKVENLKKAYYSTSRTGEIITYPVLNNVSFEIEEGEFVGIMGRSGCGKTTLLKAVGMLDKPDDGTIYYKDKDTKDIYRAELARLRRTEIAFVFQDYYLMDSLSIKENIMLPLILDEADVQESKKKCEEMAEKFAIADLLDKKPYELSGGEKQRTAICRALIYNPDLILADEPTGNLDSASSEVVIHTLEEINKKMGKTILLVTHDPIIASSCDRIIFLKDGKVKEDLKRTGDKEQFYNEIITNWCMDELYLARARYEETLKNDPEFDENLDFVLFRDHGKAIARPYYYFKKLMKKCNIDCTKHVWHDLRHTYATLLDQNNMNMKVVSEILGHYSEEFTNEVYVIHKPEVIIYDTSEVMNSFIESLKLDSTERTIPVYDISFIQEYLFMARFTLPRDVYHGKGCLSELKNLKGKKAVLVVGGGSMKRQGFLDKAVNYLKEGGMEVKLIEGVEPDPSVETVMKGAKVMQEFEPDWIVAMGGGSPIDAAKAMWVFYEYPDETFENIITPFSFPELRQKAKFAAIPSTSGTATEVTAFSVITDYNTGIKYPLADFNITPDVAIVDPELVEGLPQKQVAYTGMDALTHAIEAYVSTLNCPFTDPLALQAIEMVLDYLPASYNLNMEAREQMHYAQCLAGMAFSNALLGIVHSMAHKTGAAFSTGHIPHGCANAIYLPYVIKYNAKDKVAASRYAEIARRMGLPGTSEKALINSLCAKIDEFNAKMNIPKTLKEFGINEEEFKEKLDKIAELAVGDACTGSNPRAIDPATMAKLFTCTYYGTEVDFMYKILKAEQLTANIFLMDVEAPRVARHCEPGQFVIVKMDEKGERIPLTICDYDREAGTITIVFQPVGASTTKMKELKAGDYFRDFTGPLGNASELVEEDIEELKKKKILFVGGGVGAAPVYPQVKWLHEHGVDADVIIGSKTKDMLILEKEMEAVSGNYYPCTDDGSYGHAGMVTTMVEELVEKGNKYDVCIAIGPMIMMKFVCLLTKKLEIPTVVSMNPIMVDGTGMCGACRLHVGDEIKFACVDGPEFDGHLVNFDEAMKRQQMYKTQEGRAMLKLQEGDTHHGGCGQCGGDEMADVLKKVPVREQEPKVRATNFEEVCYGYNKEEAMEEATRCLNCKNARCIQGCPVSINIPAFIAEIKEGNIEEAYKVIGQSSALPAICGRVCPQESQCESKCVRGIKGDAVSIGKLERFVADYALENDIKPEKPEKTNGHKVAVIGSGPSGLTCAGDLAKLGYEVTVFEALHELGGVLVYGIPEFRLPKQKVVKKEIEKVKELGVKFETNVVIGKSTTIDQLMEEEDFEAVFIGSGAGLPMFMGIPGETANGVFSANEYLTRSNLMKAFDDSYDTPIAAGKKVAVVGGGNVAMDAARTALRLGAEVHIVYRRSEAELPARVEEVHHAKEEGVQFDLLTNPKEILVDENGWVKGMKVIKMELGEPDASGRRRPIEIPGSEYEIELDTVIMSLGTSPNPLISSTTKGLETNKRKCIVAEEENGQTSKAAVFAGGDAVTGAATVILAMGAGKAGAKGIHEYLSKKNAMTELDLTDGKIFLNKVTEKIRTRLAEVDASIEAGQKDIQSMNEYYWENYTEMDEYGYENYDNQQALLHQVNDNQEKLKMQHRLRKMLEAPFFGRVDFIYDGEDEPEIFYIGIGNFAERTGMLPLIYDWRAPVSGLFYDYDKGPGSYEAPAGLIEGEIAAKWQYKVKNGKMVYAFESDTKIDDDILKQELGTNSDVQLKNIVRTIQKEQNAIIRNTHDRILAIQGAAGSGKTSVALHRIAYLLYHDREHLKSSNVLILSPNSVFSDYISHILPELGEENIQEMSFDLFAYRELKGIVPDCEDRYDQLERTMKLQDPYLTERFEEKQLEGFVGMMEGFLARLEDELMDFRAIEYKGIQKTEEELINLFYFKFQNAPLLSRMDAIRDYCVDEYETLLGRDLSEEELLIVQEKFDKMYVTKDIYKIYGWLLEECGYPSLPDVEYEKRKLEYEDVFPVLYLKYRLTGKAVHNHIKHLVIDEMQDYSYLQYVILNQIFKCRMTILGDKAQTLDEQMRDVLQFLPGVFDQKIRKIVMNKSYRNTMEIARYAEKLTGVKDVELLKRHGKEVVEEQFQTEDAVLDEILSKAKLGEDEYETAAIITMTEAEASTLYQILKARDEEVHYIDRNSSVFKKGLTVTTFYLAKGLEFDQVFGVFQDAGNPMLNQAKYICATRALHELYMYQITEMKITLITVGKIKEKYLKDAIAEYSKRLSRYCKLEIIEVADEKTPDNASETVEDGIRDKEGERILKYVKDDAYVVTLEIKGKLLTSEELAEKIDKLGIQGTSHIIFIIGGSIGLGKEVLKRSDYALSFSKMTFPHQLMRVILLEQIYRSYRIISHEPYHKMKQVNLKNLCMILLGNTVYALAIVMFILPNDMITGGTTGLGIAIHHYFGLPIHTFVLIFNTLMFLLGAAVLGMKFALTTLVSTFYYPVILGVLEQIPALQNVTDDKMLSTICGGLMIGMGIGIVIRCGASTGGMDIPPLVLNKKFGLPVSVMLYVFDFIILISQMLFTNKEEIVYGILLVLIYTVILDKVLLMGSTRTKVEIMTEKYEELNRLIQERLDRGTTLVYTQTGYLRNDQPMILTVVSNRELMRLNQLVQEIDPHAFMIIGNVNEVRGRGFSQQKVYKKETIEKMATPLLVLIILAIVIIASIITSVVTYVILSGRNKRIRLAEQYRQLGITEQYLKIQDEIERIIRYKDIKLTTASPVKMSNPEDGQNEKETESGTFADDIWFIVRGKDRKTSEKLLEYWHFICENSEWKCIERKKKGMKKFGKILGGIILGIVLILLAAVAILTALEYRPDQIETLNTTSGKQSISTGDSMTILTYNTGYAGLSKDEDFFMDGGSKVMPETKDLVKHNMKGIAGILNDADADVCFLQEVDIDSKRSYHINEKAYYEKALGVDGIFACNFKCVYVPYPLPTIGKVESGLVTYSDYKVSEASRIALPESFKWPVKTCNLKRCMLETRIPIKGSDKELVLINFHLEAYDSGEGKIAQRKVLVKKLKEEYEKGNYVIAGGDFNQTFDGMDTYPIHDKDSWVPGKVGKEDIPEGFSYAVSDNVPTCRLLNGPYSGNYDDSQVYVLDGFIVSDNLKIDQVENIDTQFEYTDHQPVKLNVTLKMSSIYMNRELSWLKFNERVLEEAENPEVPLCERLTFASIYQSNLDEFFMVRVGSLYDQTLLDKKIRENKTGMTSQEQIDAILKRTKQINKRKEAVYEELMERVAEQGIRILRFNELDEEGAAYLERYFESEIAPLISPTVVGRRQPFPFLRNKEIYAVAVLGSKGKKDRLGIIPCTSNIFGRLIAVPGMQGTYMLAEELILHFAPAVFKGYKIKSKSLLRITRNADIDADALYDEDLDYREFMEGLIKQRKKLAPIRLELSRDIDKKGIAVLCEYLELDENHVFISSTPLDLSFVFQIQDLLRKHTELYFPKRTPQRSDQFQDGKSIIEQIREEDKLLSYPYESIRPFLHLLTEAAEDPDVISIKMTLYRVAKQSKVVEALIEAAENGKEVVVLVELRARFDEENNIGWSRLLEDAGCQVIYGLDGYKVHSKLCLITRKNGGQVEYITQIGTGNYNEKTSRLYTDLSLMTANVEIGLEASNVFQALSKGEVVEHSEHLLVAPKCLQNKVLAMLDEEIAHARNGEEAYAGFKLNSLTDKKIIDKLIEASEAGVKIDMVVRGICCLIPGVEGKTENIRIISIVGRFLEHSRIYIFGNSKRRKYYIASADFMTRNTVMASNSVAVCSKGANSTWLVNEENSVLVEYEPRNIAETMEYYLKNPEKLAEIRKKGLTFAQSTSWEKEAEKVRDALLKGIKEDERMKDKKVLIIGGNGFIGRNLAKILVKRNDLEVFSFDLSLPREEVAGVEYMEGDFFDDLVLENAVKGMDLVIHSLSTVNPGNSNEKYMQGYGRDFLQTIKLCKMIIDQKSNMIFLSSGGTVYGVQEDQPIKETALPVPINHYGSVKLCIENVIRTFNTQRHTKMRIARISNPFGPGQDYHKGVGFVDAAIKKSICKETLEIWGDGENIRDYIYIEDVCKMLEALVDYDGKEEVFNLSSNEGISQNMVVDILKKIDGEFDVVYKAARSVDVRKIVLDNSKIKQIYKGEIRTFETGVKEYYNYLTKKINTDKKMRKNISWNLVSKYRTELMGCSILGIILFHWYENCMIHGKSINFILHLFSLGNRFVEVFLILSGMGLYYSFKKQENIKTFYLRRITKLLPTYLILGIPYWIYFDCFLNKMNIGQVFIDISFISFITEGNRRFWFIGLILGLYLFFPIFYKIIYKNVNEWIGVGEILILYFLTTILIWKSSPTVYANIEVAWGRIPCFIVGIVLGKSIFEKKRIGLKTFLGIGIGLLGVFWGLKISEHVLITNIINRSLFGIVLGLIFLLILIIMMNALECFLIYEKFIRKILAFLGNITMEVYILHVAFRSIFDYPAEIGKYMILIGASILIAIPVNRIGKYIVNINRLRRMKKPGYYSSGEFARMAHVTLRTIRYYDKQNILKPSYVTEAGARFYTDEDFARLQQILLLKYLGFSLDDIRDMTIDDADYHFMLNSLNIQLKLVRDRIEQMQLVEQAIQDTSDLIKKEHSIDWSQMLNLIHLTGMEKSMKNQYQDASNISARINLHSLYSQNKQGWFPWIFEQLELTPGMKILELGCGDGTLWNVDRNKIPEQTEIVVSDVSDGMLRDARRTIGADDVRFKFCVFDAGRIPYDADSFDLVIANHVLFYCEDIPKVCQEVRRVLKPHGRFICSTYGNDHMREVSELVQKFDDRIVLAAENLYERFGKENGKEILRADFDKIEWRQYEDSLIVPEPEPLISYILSCHGNQGQYILDHYKEFQSYVRKKTEGGFHITKDAGIFVGYIGMKGIILAGGSGTRLYPLTMVTSKQLLPIYDKPMIYYPMSVLMNAGIRDILIISTPQDTPRFKELLGDGHQFGVNLSYAVQPSPDGLAQAFIIGEEFIGDDTVAMVLGDNIFAGHGLNKRLKAAVENAETGKGATVFGYYVDDPERFGIVEFDHEGKAISIEEKPAQPKSNYCVTGLYFYDNNVVKYAKELKPSARGELEITDLNRVYLEQGNLNVELLGQGFTWLDTGTHESLVDATNFVKTVETHQHRKIACLEEIAYLNGWISKDEIMEVYEVLKKNQYGQYLKDVLDGKYRENLYMTIIVTGGAGFIGSNFVFHMLNKYPDYRIVCLDCLTYAGNLSTLEPVMDNPNFRFVKESITDREAVYKLFEEEKPDMVVNFAAESHVDRSIENPEVFLDTNIKGTAVLMDACRKYGIKRYHQVSTDEVYGDLPLDRPDLFFTEETPIHTSSPYSSSKAAADLLVLAYHRTYGLPVTISRCSNNYGPYHFPEKLIPLMIANALNDKPLPVYGEGLNVRDWLYVEDHCKAIDLIIHNGRVGEVYNVGGHNEKTNIEIVKIICKELGKPESLITHVADRKGHDMRYAIDPTKIHNELGWFPETKFEDGIKKTIKWYLENKEWWETIISGEYQNYYEKMYAHREEIMKVLVTGVGGQLGHDVMNELASRGYEGIGSDIKETYSGIQDGTAVTTMPYVPMDITDAASVEKVLTEAAPDVVVHCAAWTAVDLAEDEDKKDIVKAVNATGTKNIADVCKKLDCKMVYISTDYVFDGQGTKAWEPDCKDYKPLNVYGESKLAGELAVSETLDKYFIVRIAWVFGKNGKNFIKTMLNVAKTHDTLKVVNDQIGTPTYTFDLARLLVDMIETDKYGYYHATNEGGYISWYDFTKEIFRQATALGHEEYSEEKVTVLPVTTEEYGVSKAARPFNSRLDKSKLAENGFTPLPTWQDALGRYLKEIEFMGQIKVEKNAGGIQGLCVIEPTVHGDARGYFMETYNQKDMEEAGLTMQFVQDNQSCSTKGVLRGLHFQKEFPQGKLVRVVKGSVFDVAVDLRSDSETYGKWFGVELTEENKKQFYIPEGFAHGFLVLSDIAEFCYKCTDFYHPGDEGGLAWNDPEIGIEWPTLTGEYKGTASGEGYALEDGTALNLSEKDQLWVGLKDTFHFMSGKLDYINMIKKVSPYNLKKGILYLRHYGPKGFWIKLTERFQKSDIDYKEWYENHRPSEQELERERKQVFEYSPKISILVPVYNTPEVFLKQMIQSVRKQTYTNWELCIANANPSNQEVSSILNVAGKKDNRIKVVDVPENEGIAQNTNRALEIATGEFVGLLDHDDLLEENALYEIVSCLNKDRKTDVLYTDEDKVTTDLDEYFSPNFKPDFNLDMLRANNYICHFFVAKKALIESVGMFRAEYNGAQDYDLILRCTEQAERISHVAKILYHWRVHKESTADNPLSKMYAYEAGKKAIEDHLRRCHTKGEVLQTENLGFYRVKYPVTGNPLVSILIPNKDQAETLDKCLKSIEKLTDYENYEIIIIENNSTEEKTFEYYEQICNDKIRVVYWEKEFNYSAINNFGAKQAKGDYLLLLNNDMEVISRDWLTELLSTCQRKEVGAVGARLYYPDDTVQHAGIIIGIGGVAGSVFVGMKRGYTGYMHRAAIQQDLSAVTAACMMMKRSVFEEVGGLEEELKVAFNDVDLCLRIREKGHLIVYDPYVELYHYESKTRGAEDTKEKVRRFQGEIEYMRSHWIDILKNGDPAYNPNLSLKKWDYSLKVNMCEVTIVIPNYKGKEYLFSCVKSLYEKDQTEKKILIIDNASNDGSIEEVVKEYPEVECVMLDKNYGFCRAVNIGIEKTDTPYVILLNNDTVIKDNYVKYLLDSIKKDPNIFSVEPKMIQYHDPSKIDSAGTYYNALGWAYAYGKDKSVKKYNNIRKIFAACGGASIYRKKVFEEIGMFDEKHFAYLEDIDVGYRARIAGYDNLYEPKSEVIHVGSAASGARYNEFKVKMSSRNNVYLIYKNMPVVQKILNSPFLFVGFLVKYLFFLRKGYGKLYVNGIKEGLHMGKKSDKVKYESGHLKNYIKIQIELWINIFRRLAMIKENQGLLNKIHVVLDAVVIVISYVLSWYLRFRSGIFEMDPWYLSLQVYMSVLIFIIPGYLLLYYIFQLYTPKRVRGRRLEAWNILQANTIGFLVFILVLYFRHQTDFSRTMIFVFYCINIFLEIVERNVIRMGLRKIRSQGFNQKHIMISVGIDVSKGKSTVCILKPYGEIVSKPFNITHTQKDLSELSSMLFRLNDEVKIVMEATGIYHLPVLTYLQEKGFFVSVINPYLMKSYRNESLRKAKTDKIDSRIIANYGIDHWFKMKEFQISGVIYEELKLLGQQYRHYMKLHLLSLAELTHLLDLTMPGIKNLLASWNETNRKDKRSDFVERFWHYDVITSMSEQEFTEKYILWAKEKKYVPSQEKAKVIYTLAQESIPTLPSETSSVKMLVTEAVRVLKEVDATLGLILSRMQEIAKTLPEYSVVREMGGVGNTLAPKLIAEIGDVRRFRNGKALVAFAGIDPPPYESGQFVGCNRKISKRGSASLRKVGYETMRSLKMRSRPEDPVYRYVVKKESEGKSKKSAKIAGLNKFLRIYYARVTELYKNIMNINNPVPGSVNCHAFGRICRWWVLQISKYAIEAADGRFYVMKKRCVAIVLSAGQGKRMGTSIQKQYIELCGKPIICYCLEAFEKSEIIDDVIMVAGAGQEDYVTEEIVNKYHFGKVRAVVSGGKERYDSVWNGLKAVRDGMAGEEAKEGYVYIHDGARPFVDEEIIKRAYTCVEENRACVAGMPSKDTVKIVDENQFAVTTPARKYVWNVQTPQVFETALITQAYEKLMQHDRENVTDDAMVVEQEMQIPVKLFEGSYCNIKITTPEDLETAKGFIEHQMSETKDVLILAIESSCDETAAAVVKNGREVLSNVISSQIALHTLYGGVVPEIASRKHIEKINQVIEEALKEAEVTLDDIDAIGVTYGPGLVGALLVGVAEAKAIAYAAGKPLVGVHHIEGHIAANFIEHKELEPPFFSLVVSGGHTHLVRVKDYGKFDIIGRTRDDAAGEAFDKVARAIGLGYPGGPKIDKVAKEGNPDSIAFPRANVEDAPYDFSFSGLKSAVLNYINGCKMKGEEYNQADIAASFQKAVTDVLVAKAMHAVEEYKVDKFAIAGGVASNSALRAAMKEACEKRGVKFYYPSPIFCTDNAAMIGVAAYYEYMNGTRSGWDLNAVPNLKLGERMLDVCLLGTGGMMPLPYRWLTSLMVRYNGSSLLIDCGEGTQIAIKEKGWSFKPIDVICFTHYHGDHISGLPGLLLTMGNADRTKPLTLIGPKGLERVVNALRVIAPELPFQIKYMELTETEQTFELNGYRLKAFRVNHNVTCYGYTMEIDRAGKFDVERAKASNIPQEYWGLLQKGETIETKRHVYTPNMVLGPARKGIKLTYTTDTRPTESIKQNAKHSDLFICEGMYGEKDKQKKAKEYKHMTFYEAAQLAKEAEVKEMWLTHYSPSLTKPEEYMDDVKAIFPNSIAAKDKRSVELVFEDMRQFEEQTKKVKEVTSIVCNKCGRVIPVIEGVPQEDVLSVDKRWGYFSDKDNRMDHFDLCEACYDELTGSFKIKLEEEMLEKICKAELSDLQDIAALESEIFSDAWSLKSLEETWNQKNAVIFAAKTEEKIAGYLIIYYVLDEGEIARIATAPSMRRQGAAGQMFQELVAFCEEQQITRIMLEVREGNEAARRFYEKCGFTEDGIRKNYYENPQENAILMSKSLMYRFQCDYTEGAHPAIMQRMVETNMEQTDGYGLDPYCDSARQKIKDLCECQDADVHFLVGGTQTNTTVISAALRPYQGAVAAVSGHINVHETGAIEATGHKVLPLPSGDGKISAVQVDEMCHAHFTDGSQEHMVQPGMVYISHPTENGTLYTKKELMDLYEVCKKYDMLLFLDGARLGYGLMAKTNDITLTDLAKYTDVFYIGGTKVGALFGEAVVITNEALKKDFRYMIKQNGGMLAKGRLLGVQFDTLFTDDLYFKISAHADELAMKLKKAFQKKGYGLRYDSYTNQQFPILPDSHIEKLKEKYVFEFWEKVSDAESAVRFCTSWATKPEVVEELIRDIEACMRILALDSSGLVASVAVVEDGAVDDQVIAEYTVNYKKTHSQTLLPMLDEIVKMTELDLHTVDAIAVAGGPGSFTGLRIGSATAKGLGLALEKPLIHIPTLEGLAYNLCGIADVVCPIMDARRGQVYAGIYEFDGQKLHILEDQMAVPIEELGEKLKKYLKEGRRVTFLGDGVPVHKTKIKEEILPGEAVTFAPANMNRQRAASVGTLGMQYYKEGKIETAMEHEPDYLRVSQAERERKERLGNVMIIETNSEKETWDLGFSLGEKACAGQVYTLVGDLGVGKTIFTKGLAKGLGIDEPVSSPTFTIVQIYDEGRLPFYHFDVYRIGDVEEMDEIGYEDYIYGEGVSLIEWANLIEEILPEHYTEIKIEKDLEKGFDYRRITICEYMKFTFYHNNINVADLDKSIEFYKKALGLKITKETEAADGSFKLVFMGDDTTPHKLELTWLRDMDRPYDLGDNEIHLAMQTDDMDAALAFHKEMNCVCFENPEMGIYFINDPDGYWVEICPVEMSTKVMTRQNEKNRNKIRTMAQIGMLSAIATVLMLFEIPLPFAPSFYEIDFSEVPILIGSFAMGPLAGAAIELIKILLNFAINGTMTAGVGEIANFLIGCSLVVPAALIYHKKHTRIGAVAGMAAGTVFMTVVGCFLNAFVLLPAYAKAFGMPIDGLVGMGTAVNKHITDLKTFVILAVGPFNLLKGILVSLIVFLVYKKISPILKMNAMEMYTGKSIFKGIAIGKILFYQKGEQPVKRVKIEDTAEQIKRYEDARAKAAEQLQGLYEKALKEVGEANAAVFEVHQMMLEDDDYIDSVVNIIETQQVNAEFAVATTGDNFAKMFVEMEDDYFKARAADVKDISERMVNILSGNESGGAIGDEPVIVVAEDLAPSETVQMDKEKLLAFVTRLGSANSHTAILARTMNIPALIEVDIKEEWNGKMAVVDGYTGTFYIDPDEDILKKMQEKKEEDIKARELLQELKGKEDVTVDGKHIKLYANIGGVKDVASVLANDAAGIGLFRSEFLYLEADNYPDEEAQFQAYKTVAENMAGKKVIVRTLDIGADKQVDYFNLDHEENPAMGYRAIRICLDRRDIFRTQLRALLRASAYGNIGIMYPMIISVDEVKEIKKIVESIKAELTEKGIEYGEVEQGIMIETPAAVMISDLLAKEVDFFSIGTNDLTQYTLAIDRQNSKLDNIYDAHHPAVLRMIQQTIENGHKAGCWVGICGELGADMTLTETFLKMGIDELSVSPTFVLPIRKLIREMSTKMKKSWGKTIKTILGVLVGNLVLSFAVAAFTVPNGIIMGGATGIGLTISHYFPVNLSLIILAINAVLFVLGAVFLGKKFALTTIISSFIYPIFLSMAQSIPGIDKVTENNAMLAALYGGVLLGIGIGLVVRVGASTGGTDILALVLHKWFHVPVAVFLYIVDFSVLGLQMLFSDSEQILYGILNLFLSTVVLNRVMLLGKSQIQLFIISDKYREIRQKVLTDIDAGVTMVDIETGYGEQKQQGVLCVIHSRKLYSVKEAIQEIDPKAFITITQINEVRGRGFTMEKLRYDELNHTKNMDINQVITGELGVKRWQVDAAVKLIDEGNTIPFIARYRKEVTGTLDDAQLRTLHERLMYLRNLEEKKEQVLASIEEQGKLTEELKKQILAAETMVVVEDLYRPYRPKRRTRAMIAKEKGLEPLAALITLQKAEKPIEVYAEEYVNPEKEVKSVKEAIDGAKDIIAESVSDEADYRSWIRKATVQHGKVISQAKDEKAESVYEMYYDFEEPVTKLAGHRVLALNRGEKEKFLTVKIEAPQDDILRYLEKKMIHSDNPHTTPILKEVAEDSYKRLIAPAIEREIRSDLTEKAEDGAISVFKKNLHQLLMQPPIVGQTVLGWDPAFRTGCKLAVVDPTGKVIGTTVIYPTAPTTPKKIQASKDLLKKIIAKYNITLISVGNGTASRESEQFIVELLKEIPQKVQYVIVNEAGASVYSASKLASEEFPKFDVGQRSATSIARRLQDPLAELVKIDPKSIGVGQYQHDMNQKKLSEALSGVVEDCVNKVGVDLNTASAPLLSYISGISGAIAKNIVAYREENGRFTDRKQLLKVAKLGPKAFEQCAGFMRIQNGTNPLDGTSVHPESYEAAEKLLKKQGFSLEDISGGKLTGLSLTIKDYARLAKELEIGEITLRDIVKELEKPGRDPRDEMPKPILRTDVLDMKDLKEGMILKGTVRNVIDFGVFVDIGVHQDGLVHISEITDKKFIKHPLEVVSVGDIVDVKVMSVDLKKKRIQLTMKGISMNQETQGLSKQQIKSRETRAKIFQAAKRILQKQGYEQLSIKNICEEAGVSNGSFYHHFKTKDDLLSYYIEEQPSMDPDLLELPSSAAETKEAIISVYLNYVHYCEELGVEFMANYYTPKNQSLNPLIRTERPYPIVTVHDYLKRVIESGIISPSADLEDITTDIRMIVIGNVFEWCLKSGDADFEGNMRRSLTTYLNGLFMYTFIANPNARSGRGILLWKQIEKILQEKEIEYKVLFTKYQHHATRLVHDLTSDSASHTIVVLGGDGTLNEVIDGIVYLDKVTLGYIPLGSGNDFARGLGLPTDIHGALEQILAPTHYTAMNVGVLDYENKHRRFAVSTGIGFDAAVCHQVMVTPLKAFLNRLKLGKLTYLGVALHKLFTLKPVTMTVTTENGETKTYEKVYFTAVMNLKYEGGGFNFCPAASGTDDRLDIITVAELPRLKVLCLLPTAFKGWHTRFHGIHLDTCTEVTVISDYPLPVHTDGEPVFLQSEIHVHLEKEKLRIITPCMRLLITGIIVFLILFYFYLIWPRLSRKRQIRPFLHTMFAHRGYHCIEKGIPENSIPSFRAAISHGYGIELDVHLTSDEKLVVFHDDDLSRICGRPETIESLPLKELQSCRLQNTNETIPLFTDVLSLVGGQVPLLIELKIPKSSLGICEKTWEILKNYNGPYMVQSFNTLGIWWFRRHVPHVLRGQLSSNLTADHLPEPWILTFVVKHLLGNVLGRPDFISYKLADLPMFEVWFLKYILHLPVAVWTLRTPDALKKGKRHYDMQIFEKKNTYYMKAIDKAKSFLKKYRHAWVLSYFLIYMPWFVYLEKRTNVRHYMIHSPIDNHIPFIEYFIVPYLVWFVFIAVTVAYFLIKDKWGFYRLCAFLFSGMTIFLIICTVFPNALNLRPTVFPRDNVFTDMVKVLYKTDTPTNVLPSIHVFNSIGVSIAISHSNDLKKHRWIQISAYILAVLIILSTMFLKQHSVTDVIAAVTMACIIYPFVYVTADKKAPKLSQQPTMSGKAEEVKRWYYGYHFGRFDVYCPWDVMNYMRDLQQNPEAAPASYWKNTSDDAVIRSFIEYAGSNITKKLETLLARLRHRIFQKALSVKENGTKIKRCRMNLFKELKSGSAGKIQVGQSLHTMSTALKDNTALRFAVITGCLKIAKESIFTGTNNFVSDNITDSRFNEYFGFTMNNQLNFPVGISDFKKIRENDYYYIDKSGLIKELLKRESAEVTLITRPRRFGKTMGMSMLAHFLIYVPITGGYSMVLKLSTMKHCAVHGMEKFRKCIADTTFLNDDESKALSEAILDKYCEVTGCNKEYVWETDTMSGNNWSQVPVTIVEMGYMTNPEEDVLMQTAEYQQKMVQWSQMEHKVVKKTEVKVEEAKSKKDRELQEPKMSSEAELRNIVKPLVNWYRENKRDLPWRHNPDAYRVWVSEIMLQQTRVEAVKGYYDRFLKALPTVKDLAEAEEDKLLKLWEGLGYYNRVRNMQKAAQQIMVDHAGRFPDTYEEILQLKGIGNYTAGAISAFAYGIPKPAVDGNVLRVISRITGSYEDIMKQSVRKKIESALEQVIPTDAASDFNQGLIELGAIVCVPNGGPKCEQCPVKEYCIAHAENLTAEIPVKKKAKARKIEERTVLIFKDGKQIAIRKRPAKGLLAGLYEFPNLEGKFSMAEVTEYSKKIGLMPVRIQELPEAKHIFSHIEWHMTGYEVIVDELEKTNEEGFLFIHPEQIKKEYSIPSAFEKYTEYAGIRSKMSITAETAKAHANDPAVLCCRAEGGITIEPANLEDPAIFDELVDSGLLNLDGCLKIGQVLGAKLTKTSDSLCPLTADNVDGFKTDDELAAEEAPAKEEAPAEAAPAASVQGAVTTIKHGKVVISIKEGKDIYLELPIMSERAAGILMPISSLPSEYGIGCFSKSAYEFVDWLKKAGQSYWQILPLGPTSYGDSPYQSFSTFAGNPYFISLEALVEEGVLTKAECEAVDWGKAKGSIDYKKIYEGRYPLLRKAYERSKIHENAEYQKFVEENSWWLSDYALFMAVKDRFDGVEWKLWADDIKLRWGPAMDYYREELYFDIEFQQYMQFKFYEQWMQLKAYANKKGIQIIGDIPIYVAMDSADTWAHPELFQLDEENVPVAVAGCPPDGFSATGQLWGNPLYRWGYHKETGYQWWISRLAYVFRLYDVVRIDHFRGFDEYFSIPYGAETAVDGHWEKGPGMDLFWKVREALGEKPVIAEDLGYVTDSVRDLVRDSGFPGMKVLEFAFDSRDSGSANDYLPHNYPVNSVAYTGTHDNETLAGWWGSISKDEQKLTREYLCDTYTPEAELNKPLISLIMRSAAKWCVIPMQDYLGLDNKCRMNTPSTVGTNWKWRIRKNQLSVKLQKEIHAVTLRYGRMNWTEDVEEAAEAEKMNENESKKVPEVILALLTGKAVPLSEVPDPVFSDKVLGDEVAIIPADVRSSNVICNGKNAPVVSDHYGVMITVMAVTIKDVAALAGVSPSTVSRTCKNNPSISEETKERVRKAMAELGYEPNFQASNLASQNSRTIGIILPASAKEVYENSFYLEAIQGISHYCNGRQYMTTIVTGQDEAEILDAVRSMSRSGKVDGFIILYSKKDDPVIDYLFNEGLLYILIGKATQYTNQTIYIDNDNLLAGREAAEYLYQLGHRRIAYLGSDSSLMFSADRKAGYQLALASHQLPVRPEYCVEVKNVSENNEEAIRGLLMQKDRPTAILVSDDILAVSLERVCLENHLAIPEDLSIISFNNSLFARLTSPQLTSIDIGAGQLGSEAASQIINHIENPNLLATKIIVPHHLIERDSCCKIMTTKKDDVLIKVEGLHKIYGDFHALNGIDEEIHRGEVVVIVGPSGSGKSTFLRSLNLLEVPDQGHIYFEGVDITDKHVDINKHRQKMGMVFQHFNLFPHKTIKENITLAPIKLLGKSKEEADKRAMELLERVGLAEKADSYPSQLSGGQKQRIAIVRSLAMDPDVILFDEPTSALDPEMVGEVLELMKQLAREGMTMVVVTHEMGFAKEVGSRVIFIDAGQIKEQAKPEEFFENPKDPRLKEFLSKILMQELKSSFISNFIDDNRWRYITDGLKITLLVTVFAVLIGVVLGFLIAIVRTTHDKTGKLKILNAICKVYLTVIRGTPVVVQLMIIYFIIFGSVDISKVVVAIVAFGINSGAYVAEIFRSGIMSIDNGQFEAGRSLGFNYAQTMMYIVMPQAFKNVLPTLCNEFISLLKETSVSGYIALQDLTKGGDIIRSRTYDAFMPLIAVALIYLAMVMIFTKLVSLLERRLRNSDHMKLKKLISVMLIGACVCSMAACGSKKEEKKIESADDLKDAKIGVQTGTTGDIYCSDDFGDDHVERFNKGADAVQALVKGKIDAVVIDNEPAKAFVDANDGLKILETPYVEEDYAMCFKKGNTELEDKFNAAIKELKEDGTFDKIVGYYIDGTEEKGYESPADVDHSNGKLVMATNAAFEPYEYYEDNKIVGVDVDFAQAIADKLGMELTVNDMEFDSIIAAVDSGKADFGAAGMTVTKGREKQVDFSDSYYTGKQMIIVKKMLDIIKVIILGIVEGITEWLPVSSTGHLILVGNVLKPSMSDAFMEMFDVVIQLGAIMAVVVLYFHKLNPFSPRKSHKQKMLTWQMWIKVLIASVPAGIVGVLFNDILDEIFYKPIPVAVMLIVYGILFIVVENHNAGKKPSVTRISQLSVQMLLWIGFFQMLALIPGTSRSGATIVGALLIGVSREVAAEFTFFLAIPAMFGASLLKLIKFGFHFTGAEFGLLMLGCIVSFGLSVIAIKFLMGYIKQHDFKVFGYYRIVLGGLIIVWTIIQTVIAMIGMDLDGTLLKSDKELTQYTKDVLKRAIEQGIIVMPATGRPITGVPKELLEFPGIRYAVTANGGRVIDLEKNEAIVEELLPHDIAEVMMDVFEHYDTFREIYFDGVGYASREALEHIGKYLSVPAMANYIMSTRVAVDDVRVKFDETKLPVDKIQALFTSVEDRDAARKEIEDVPGIEITGALPMNLEINAAGVNKGKAMIELGKLLGIPREEIMAFGDGNNDLKMLKEVGTGVAMENAIPSVKEAAEYVTLSNDEEGVAKFIEKYVLDMKKYEEENYKLENISEQIYPWIKAELTDSQALNGKHFSEEDAPVIGFLGDLNVVFAIKRGEDIYEILKDNMLPPECDIIKLYHKACENLNRDVEFVIANTWYGGYGIVADGHHEASSVCFKHIWQVCADKLKDDLIIMIPRKDTVLFAPAGNKDIVEKMIDHGEKAYEQGENKISKKLLMFLREGKELITYENMISMKKKRALRSALAITICTVTIASVSTPVYSAPSTDELENTTSDLKGELNDLNSQLSSLSKELDTASSQVEDLAAKVEKSKLDLASAQLDEEAQYDSMKDRIKFMYEGGGASLVQILLTSENMGDFLNKAEYVATISKYDRSMLEELQQVRANVEKKQKDLEEQQSKLSGLQETLTSKRDELNSKISSTSGELANYQAQLDRAKAAEEALKLAQNDKISGSVKSEASKPSNSTNTTNNANKTNSTTNGSTNQNKNNTTNNTGNHTTNTGNNTNVSTTDVALLAAILQCEAGSYDGMLAVATVIMNRVASPAYPNTLRAVIYQSGQFAPTWNGSLNKVLSKGASSTAYSVARAALGGARHSAVINCLQFRSASTGVSGINIGGNVFFMKLEKKNLIVERPYKSVYKTEEGIVKIFATDHPKSAVFNEALNTVKVEETGLDIPKLKEVTQINGEWALLIENREGKTLEEMMKVDRANLEKYMSDFVDLQLKVQSKTATTLPKLKDKLADEIRSLKDLDATERYELLTRLEGMPKHTKLCHGDFNPSNVIVEKNGKMTVIDWAHASQGNASADAAMTYLLFALHDQESADLYLKLFCKKSDTARQYVEQWLPIVAAAELGKDIRLEKDFLMKWIDVMEYEMATKKKENAVPEIIDNVEALEAKMKAMREAQKKFATYTQEQVDKIFFEAAMAANKMRIPLAKMAVEETGRGLVEDKIIKNHYAAEYIYNKYKNDKTCGVIEEDKAYGIKKIAEPVGLVAAVIPTTNPTSTAIFKTLICLKTRNAIIISPHPAAKACTIAAAKVVLDAAVKAGAPEGIIGWIDVPSLELTTTVMRDSDEILATGGPGMVKSAYSSGKPALGVGPGNTPVIIDDSADIKMAVNSIIHSKTFDNGMICASEQSVTVLDSIYDEVKKEFAYRGCYFLKKGEELDKVRKTIIINGALNNKIPGKSAYEIAKLAGVEVPKATKILIGEVESVDISEEFAHEKLSPVLAMYRAKTFDEALAKAEQLVADGGYGHTSSLYIHPSQTEKIEKHQQAMKTCRILINTPSSQGGIGDLYNFGLAPSLTLGCGSWGGNSVSENVGVKHLINIKTVAERRENMLWFRTPEKVYFKKGCMPVALDELGTVMHKKKAFIVTDSFLYKNGYVKPIEDKLDQMGIQHTCFFEVAPDPTLQCARRGVEQIRAFEPDTIIALGGGSAMDAGKIMWLMYEHPEAKFEDMAMDFMDIRKRVYTFPKMGEKAYFIAIPTSSGTGSEVTPFAIITDADTGVKWPITDYELMPNMAIVDVDNAMTAPKGLTSASGIDVMTHAIEAYVSIMATDFTDGLAMKAVKAVFDYLPSAYENGANDPIAREKMANASCMAGMAFANAFLGLNHSMAHKLGAFHHLPHGIANAVILTDVMRYNAAEVPTRMGTFSQYQYPHALARYAELGRFAGCKGKTDEEVFENFIAKLEELKEKIGIKKTIKDYGVDEKYFLDTLDDMTEQAFNDQCTGANPRYPLMSEMKEIYLKCYYGKMVNLTIDGRKITVKENTTIMEAAAQNGIPIPKLCYLKGINEIAACRVCVVELEGKEKLITSCNNVAKEGMVIHTNSPKVRRHRRTTVELILSQHDCECVTCSRSGNCSLQTVANDLNIIEIPFKMEIERQPWNKEFPLIRDSSKCIKCMRCVQVCEKVQSLGVWDVEGTGSRTTINVAGHRTIEEASCALCGQCITHCPVGALRARDDTEDVWDAIADPDKIVVAQVAPAVRTAWGEEFGLSDKEATVGKILDALKRMGVDYAFDTTFSADLTIMEEGTEFLHRFTAGELKERPMFTSCCPGWLRFIKSQYPHLVRQLSTAKSPQQMFGAVMKTYFAEKLGVSPEKIYTVSVMPCVAKKGEKEMELFYQEYAGHDIDAVITTRELTKMIKSAHISPDTLADIDSDRPMQDGTGAGVIFGATGGVMEAALRTAYYLLKGENPPEDAFKAVRSTGFNQNQGIQEANFQIDNVTVRTAAVSGLGNARALLDRINKGEVHYDFVEVMACPGGCVGGGGQPIHDGRELAYERGQKLYSLDKNAKRRFSHENQDVQKMYEEYFVKPNSPKSHMLLHTEHKLEGFMSRLEIASPKRAKIVMEGLYKDLERRIESSPPGLCPVDMARAFLELCHAQTCGKCVPCRIGLGQLNNFIREVLDGKATMKTLDIMEQTALSIMESADCAIGYEAANMVYKGLIGYRDDYIEHIQNGRCTCTYNQPVPCVSLCPAHVDIPGYIALVGEGRYADAIRLLRKDNPFPTTCGFICEHPCEARCRRNMVDDSINIRGLKRVAADFAGEVDPPQCAPSTGKKIAILGGGPGGLSAAYYLQLMGHQTTVYEMLPELGGMLRYGIPNYRLPKERLDDDIRAILKTGVQVKNGLKIGQDITIQELRQQYDVVLITIGASTDKKLGLENEDADGIISAVQFLRNVGKNQIIDLTGKEVVVIGGGNVSMDAVRTAKRLGAKKVSIVYRRRVADMTALPGEIEGAVAEGIELQTLKAPASIDVDENHHVKGIYVTPQMVSSIRDGRASIKPTGEEDIYIPCDVLIVAIGQNIETHHFEQAGIPVERGKIITKSTGAFENLPGVFAGGDCASGPASVIKAIAAAKVVAANIDEYLGYHHEISCDVEIPEAHLDDRTPCGRVNLTEREACERVCDFEAVENCMTEKEAKQEASRCLRCDHFGYGIFKGGRETLWMAKYRKLGRTSSQRKALLRNQVTALLNNGKIVTTEAKAKEIRKIAEGLIALAVKEKDNFEEVTVKAKVARKDKDGKRVKEVVDGKKVTVYDEVDKTIKKDMPSRLHARRQMLKVLYPVKEVPTAQAGKKKNTKEVDLVAKLFDEIAPKYADRNGGYTRIVKIGQRKGDAAMEVLIELVMFDFNKPNIEITDISDDKKYGRFVVEPLERGYGTTLGNSLRRIMLSSLPGSAISQVKIDGVLHEFSSIPGVKEDVTEIIMNLKSLAIKNTSESDEPKTAYIEFEGEGVVTAADIQVDQDIEIMNPETVIATLNGGADSKLYMELTITNGRGYVSADKNKNDELPIAVIPIDSIYTPVERVNLTVENTRVGQITDFDKLTLDVYTNGTLLPDEAVSLAAKVLSEHLKLFIDLSEVAQAAEVMIEKEDDEKEKVLEMSIDELELSVRSYNCLKRAGINTVEELTNRTPEDMMKVRNLGRKSLEEVLAKLDELGLSLSKGEEMAVNRVPVLKRCRSLGMDPVYLGIDKKSNRQLKRANRKMSEYGLQLREKQKAKFIYGVLEKPFLNYFKKASKMNGMTGENLMVLLESRLDNVVFRLGLARTRREARQIVDHKHVLVNGKQINIPSYLVKAGDVVEIKEAKKSSPRYKEIVEVTGGRLVPEWLEADLENLKGTVKELPKREAIDVPVDEMLIVELYSKMAKKVTKKVTKKRVKKNVEHGQAHIQSSFNNTIVTLTDAQGNALSWASAGGLGFRGSRKSTPYAAQMAAETAAKAALVHGLKSVDVMVKGPGSGREAAIRALQACGIDVTSIRDVTPVPHNGCRPPKRRRVMARIAGVDLPRDKRVEIGLTYIYGIGRTSATRILTEAGVNPDIRCRDLTDDDVKKISAVIDETQTVEGDLRREIALNIKRLQEIGCYRGIRHRKGLPVRGQKTKTNARTRKGPKRTVANKKKMSKADVIEIEGTVVEKLPNAMFQVELENGHQVLAHISGKLRMNFIKILPGDKVTLELSPYDLSKGRIIWRDKMVMYEAGMLARSKAGHDKAQMYIIKEVDDTYVYLVDGRIRTLGHPKKKKKKHVQIVHGIYNMKELDDAGIRKLIKDWMKEEKMAITIKSEREIELMAEAGKILERVHNELEKALHPGMSTKDIDTLGEKIIRSYGCIPSFLNYNGYPASICVSVNQEVVHGIPDKHRIIHEGDIVSLDAGVIYKGYHSDAARTHAVGEVSEEAKKLIQVTKECFFEGIKYAKAGNHLFDISGAIGRYAEERGYGVVRDLCGHGIGTALHEAPEIPNYEVGRKGVKLRPGMTLAIEPMINIGTYEVDWLDDDWTVVTRDGSLSAHYENTILITEGEPRILSLTCDNEMKIIMLGAPGAGKGTQAKKIAAKYDIPHISTGDIFRANIKNGTELGNKAKTYMDQGLLVPDELVVDLVVDRVQQDDCKNGYVLDGFPRTIPQAEALDKALAEFGDKIDYAIDVNVPDENIVKRMGGRRACVGCGATYHLVYAPTKTEGICDVCGKELILRDDDKPETVQKRLNVYHEQTQPLIDYYTKAGILKTVDGTVDINDVFAAIVEILGAMLIVIRIGSQLPTPGVNGEYIKNFFAQNTGEAFNLFNAFTGGSFEQMSVFALSITPYITSSIIVQLLTIAIPQLEEMQRDGETGRKKIVAITRYLTVGLALIESGAMAVGFGRQGLLVKYNFVNAAIVVLTLTAGSAFLMWIGERITEKGVGNGISIVLVINIISRIPSDMKTLFDQFVKGKAIASACLAVCVIIAIILALVVFTVILQDGERRIAVQYSQKIVGRRSYGGQSTNIPLKVNTAGVIPIIFSSSLMQFPIVIASFLGKDNGSGIGSEILRGLNQSNWCNPEQIKYSWGLVLYIVLTVFFAYFYTSITFNPLEIANNMKKSGGFIPGIRPGRPTVEYLTKILNYIIFVGACGLILVQIVPILFNGWLGAKVSFGGTSLIIIVSVILETLKQIDSMTLVRTYKGFLNSMNAFXXXXXXXXXXXXXXXXXXXXXXXXXXXXXXXXXXXXXXXXXXXXXXXXXXXXPELMADLKITLVKSTIGAVPKHKKTVEALGLKKLNKTVVLPDNAATRGMVKQVSHLVKVEEVMRQERIDANSLELNEKVVSIKRVTKVVKGGRNMRFTALVVVGDGNGHVGAGLGKATEIPEAIRKGKEDAAKNLISVALDENDSVTHDYIGKFGGASVLLKKAPEGTGVIAGGPARAVIEMAGIKNIRTKSLGSNNKQNVVLATIEGLRQIKTPEEVAKLRGKSVEEIFGMVSKKSRSEVRVNKHRKLRNRLSGTAECPRLAVFRSNNHMYAQIIDDTVGNTLVSASTLQKDVKANLEKTNNVDAAAYLGKVIAEKALEKGIKDVVFDRGGFIYQGKVQALADAAREAGLNFMSRIGRHPIAIPAGVTVEIAENNVVTVKGPKGTLEKALPTEMEIKQEGEEIVVTRPNDLKKMKSLHGLTRTLINNMVIGVTEGYQKVLEVNGVGYRAAKSGNKLTLNLGYSHPVEMEDPEGVETVVEGQNKIIVKGLSKEKVGQYAAEIRDKRRPEPYKGKGIKYADEVIRRKVGKTGKKMTMSDPIADMLTRIRNANTAKHDTVDVPASKMKLAIANILLDEGYIEKYDVIEDGVFKTIHITLKYGADKNEKVITGLKRISKPGLRVYASSENVPKVFGGLGTAIISTNQGVITDKAARKLGVGGEVLCYIWMAKTAMKVKQQRKQKFSTREYNRCRICGRPHAYLRKYGICRVCFRELAYKGQIPGVKKASWMSRLKEQYQNEIIDAMIKKFGYKNIMEVPKLDKVVINMGVGEAKDNAKLLDAAIADMEKITGQKAVVCKAKKSVANFKIREGMPIGCKVTLRGEKMYEFVDRLVNLALPRVRDFRGVNPNAFDGRGNYALGIKEQLIFPEIEYDKVDKVRGMDIIFVTTAKTDEEARELLTQFNMPFTKMSMLKIKKGDTVKVIAGKDKDKEGKVIAVNQKTGKVIVEGVNMLTKHTKPSAQNQEGGIVRQEGPIDISNVMYVHKGTATRVGIKMDGDKKVRYAKSTGEVIDMIQQESRLKVADNTGAKELLCIRVLGGSTRRYASIGDVIVATVKDATPGGVVKKGDVVKAVVVRTVNSTRRKDGSYIRFDENAAVIIKDDKTPRGTRIFGPVARELRDKQFMRIVSLAPEVLMERNLRKTRVGKVVSNKMDKTIVVAIEDHVKHPLYKKIVKKTYKLKAHDENNECNIGDKVKVMETRPLSKDKRWRLVEVMEKVKMKINAFVEDLKTKSAAELNEELVAAKKELFNLRFQNATNQLDNTSRIKEVRRNIARIQTVITEKAAQMLMPKRVKRRKQFRGTMKGKALRGNQITNGEYGIVATEPCWIRSNQIEAARIAMTRYIKRGGKVWIKIFPDKPVTTKPAETRMGSGKGTLEYWVAVVKPGRVLFEIAGVPEEVAKEALRLATHKLPCKCKVVSRADLEGGDNSENMGQKVNPHGLRVGVIKDWDSRWYAEKDFADCLVEDHEIRTYLKKRLYSAGISKIEIERASDRVKIIVYTAKPGVVIGKGGAEIEKVKGELAQFTDKKLIVDIKEIKRPDKDAQLVAENIALQLENRISFRRAMKSCMSRTMKSGALGVKTSVSGRLGGADMARTEFYSEGTIPLQTLRADIDYGFAEANTTYGKVGVKVWIYKGEVLPEKTVKEGDRMAKGHRSQIKRERNANKDTRPSAKLSYARVSVQKACFVLDAIRGKDVTTALGILTYNPRYASSLIKKLLESAIANAENNNGMNAENLYIAEAYANKGPTMKRIRPRAQGRAYRIEKRMSHITLVLDERMARSIKKGPFADASLLKKVDAMNEAGDKSVIKTWSRRSTIFPSMIGHTIAVHDGRKHVPVYVTEDMVGHKLGEFVATRTYRGHGKDEKKSKVRMGIKTYRPYTPSRRQMTGSDFSEITKTTPEKSLLAPKSRQAGRNNQGKITVRHRGGGAKKKYRIIDFKRRKDNIHATVLGIEYDPNRTANIALICYEDGEKAYIIAPEGLTDGMTVMNGPEAEVKIGNCLPLAQIPVGTQIHNIELHPGKGGQMVRSAGNSAQLMAKEGKYATLRLPSGEMRMVPLECRASIGVVGNGDHNLVNIGKAGRKRHMGIRPTVRGSVMNPNDHPHGGGEGKTGIGRPGPCTPWGKPALGLKTRKKNKASNKMIVRRRDGKAIKMANVQYYDVILKPVVTEKSMELMGEKKYTFLVHPEATKSQIKEAVEKMFTGTKVEKVNTMNNDGKKKRVRGTYNFGKTAKTKKAIVKLTEDSADIEIFQGLMANVSVYNIEGKEVGKIDLSDAVFGVEVNEHLVHMAVVSQLANNRQGTQKAKTRSEVSGGGRKPWRQKGTGHARQGSTRAPQWTGGGVVFAPVPRDYSFKMNKREKRAALKSALTSRVEENKFIVIDEINFEEAKTKNFANILKNLDVSKALVVLEDDNKNAELSARNIADVKTAKTNTINVYDILKYNTVITTKAVVAKIEEVYAMKKAILATKVGMTQIFNEDGTLTPVTVLQAGPCAVTQIKTVENDGYEAVQVGFVDKKDKIINKDKGGKKEIVHRHGVTKAEQGHFAKAGVTGKRYVREFKFENASEYELGQEIKADIFAAGDKIDATAISKGKGFQGAIKRHNQSRGPMAHGSKYHRHAGSNGACSDPSKVFKGKHMPGHMGSKKITVQNLVVVRVDAENNLLLVKGSVPGPKKSLVTIKEAVKANMASQVMRITLKAYDHQLVDASAKKIIETVKKNGSKVSGPVPLPTKKEVVTILRAVHKYKDSREQFEQRTHKRLIDIIAPTQKTVDALSRLEMPAGVAIDIKMKMDVLLPFFAQYYNEWSVLHMSENGNQSREWNSRFGYIMVAAGAAIGLGNIWKFVYLALMFVTSNAIDGLKCYLLPDFSKFNFTVFSQAATQVLFSVGIGNIIVSLRFGLLSNIKLPWLDASGISHLGIMGFKEYEKELTNDGKFGRVTLYDKILTCIVVPIFMIIIILNVFGFIRMDIKSWKIMLAVDDYGSFTRVGAELGYTQSGITQMMKNLEKKVGFPLYIKDHHGITLTNEAKSLIPAIRTLLNADEVIHQEIAALNGAQRGTIRIGTYLSCSIHWIPKIIREFQQKHPDIIIQVIEGVEGELADWIQERRVDIGFISLQKNHKYQFLPVMNDLMYAVVPENDPLAKEEEIPIEAFEDAPFIITEYTPGSDVHRILKKHKIHPDIRYVTRNEFSSLSMVEHELGYSILPGLLLRGQQGKFVKRPLKPTITRQLGLAYSSLENLSPASKTFLEYAKDFLLDDMLLAIQILLGVLFAGTGIGLVVDLGKNRMDELKGSTGKQWASAFTVGIIANFLDTLGCGSYAPSTFMYKLFNQIDDIDIPGTLNIGDTFPVIFEAFIFTTSVECDPLFLWVMFICAAVGSFGFASIVTKWPRNKIRIALGCAMLPLAVVMLCKNLGVGPFGLVGTAVGLTGWKLIVAAALNVLWGALMDIGFGLYAPCMATCLLLGVDAQTCFPVFMGSCACLMPACSIEFIKSHRYDVAHTIGNAIGGCIGVFIAWKLVTGLPMFWLINLICLVLVWTSYTLLSAAKKDKAKGIAMFVNEYVMTRKRYDKWAAPKFWRLPIFYVYCVIFASGTFGWIYFHHVGASLRWQSVGATLSFIAIYRGVFFKWMHADKTFRVMRTQYFNDKDWTCKVMIREKDIALYINNKINNHVNWEDLTKFEEAKTYYKLTSKDQIEGVMLDKESFTKGDSESFKQWMLEQHPEIEYGPIDPAFDKMGIGPSTKETSLHHFRDPLLEVVAEDTDLDLLGLIIVGTPDDNKDKMLVGTRAAAMAECMRADGVIISSDGWGNSDVDYTNTCEQLGIRGIPVTGLNFSGTVAKFVVENDYLDGIVDINKSADGTETDVVGENNMVRVDCLKAKALLKLKMRHKDEQEGRMAEKEIDLRRLVIKAFHMTDVEWGEYNNITTDGHMTVSKEMIDQLVAQDDCIEKIDIQIIKPGDHDRWTNTIMDIIPISTKVLGKLGEGITHTITGVYVMLTGVDVNGKQCHEFGSSEGNLKEQLCLNRAGTPGDDDYIISFDVTFAAGMGQERHGPFTAHKLCDEFIQTYREKLKKFKGDKCTERHEYHDKVRPGKKKVVIIRQVAGQGAMYDTWMFPDEPSGVEGGRSIIDMGNMPVMITPNEYRDGMIRSMQMSLTVVKGLQSEIFVPITPPSVWAPVTKELKDMSIALATAAGVHKKSQERFNLAGDWTWRKIENTTPSSDLMVSHGGYDNSDVNKDINCMFPIDRIHELAKEGFIRACAPVHAGFMGGGGNQEKFKHETGPAIAEMFKNEDVDAVILTAGXGTCHRSAVLVQRAIEEAGIPTIIIAALPPVVRQTGTPRAVAPLVPMGANAGGPHNVEQQTQIVKATLEQLEKIETPGKIVPLPFEYVAKIMDNERLHYGDKIIYMEGVIVAVDDCSISVDLKGRLGFFKAPKRMFICDTEPKVGQEVGWNMSFPEQLGPEVNEKYVSNIEKERRKQQEMQARLDANKEDMSITAETAKAHAHDPAVLCCRAEAGITIEPANLEDPAIFDDLVDSGLLNLDGCLTIEEVLGAKLTKTCDSLCPLTNDVLDGVKAPTTPAEEAEEEAPAEEAAPAAPVATAATVAGGTLKIHIGEGKDINLEIPVGALGATGEAVAEVPAAVAATATAEAPVEETKVVGTLTRRHIKITEVKRGPETKIEGTTLYIREGIEAEVIADQELVKDFHLEIITPDQYHTYSETIMDVQPIATKEGDAILGEGATRVLDGVVMMLTGTDEGGVQIGEFGSSEGYLDENIMWGRPGCPDKGEIFIKGNIVVQEKTNMERRGPMAAHTAFDIITQEIREVMKELDDSFIVEDEELKSIRRPGKKKVVIVKEIMGQGAMHDNFILPVEPVGILGARANVDLGNVPVCVSPLEVLDGCIHALTCIGPASKEMSRHYWREPLVLEALHDEEVDLCGVVFVGSPQINAEKYYVSRRVGHTVEMMDVDGAFVTTEGFGNNHIDFASHIEQIGMRGIPVVGLSFCAVQGALVVGNKYMQYMVDNNKSESGIENEVLGCNTLCQEEGIRALAMLKAAMAGEEVKAAEKKWNPNVKATNVELIEAACGKKIELVDNEQSLPMSQKRKEKYDMGNVQMLLRQHVGAPCAPCVEVGAEVKKGTLIATPTGLGANIFSSVYGKVTEITEDRIIIEPAAEQPDEFIPVTESVEGITDESSKLDLVKAAGIVGMGGAGFPTGVKLNINLEETPMGELDPEINPELPKDFKLDCGYILVNAAECEPGLEHNTRQIEEQSDKLIRGIKYSMEITHAKKAIIAIKKKHHKAIKVLQKALENEPDIKMHLMADIYPMGEERAVVRECLGVLLTTTQLPSAARSVVINVETVCKIAEAVDEKKPCISKNMTVRGKLNGGNEAHVFFDVPVGVSVGEMIEKAGGIDGKYGEIIMGGAFTGKSTTLDAPTTKTTGAILVTIEFPDLHGATMGILVCACGGSEERMREIASKMNAKVVSMCKCKQAIENKPGAPLKCLRPGNCPGQVKNNIQFKKDKCEYILIGNCSDCSNTVMASGPKMGLKVFHQTDHVMRTVGHPLYRSLKVSKEVSQEIDFMKLEAKVNFDRFEEALQVVDAHTAGEFCRMVIGGFPEPEGSTMIEKKKWMEEKYDHVRTALMLEPRGHHDMFGAFLCEPIHEEADLGVIFMDTGGYLNMCGHCTIGAVTVALEAGLVECHEGENEVVLDAPAGIIRTKAHVKDGKVTDVTLTNVPAFIYKDNLTVNIDGVDIPYTISFGGSFFALVDTTKLDIGEINAKTVPAYTELGMKIRDKVNAEVKIQHPTLDITEVDLVEFYGPTPNPDQATMRNVVVFGDAQADRSPCGTGTSAKLATLHGWGELGIGEEFIYESFMGTRFKGVIKEETKIGDYDAVIPMITGSAYLTGVATYLIDSTDPLKYGFLVGMIRMPRKRRSTKSRIVKAAWNLFYKNGYEQTTVEDIINASKTSKGTFYHYFKGKEALLNSLSYLFDQKYEDLAAVIDPNLSCYDKLLFLNHELFYMIETSVDIHLLAYLYSSQLVTKDKKSLSDKKRIYFKWLTEIMEEGLKNGEFKNTSTASELMEIYAMYERALLYDWALFKGKFSLTERTDKLLPHVLQTFVDGLMRKKVMKLVVTFHTTSDAMAMEKVCKERNVPGRLIPVPRAISAGCGLSWCADLTDREQILDVMKEVGIEQEDVHECLVMKEVDARGLSCPEPLMLTAEALKGETGPVKILVTEPHQKMNVEKFAKSKGKKSTAVEKDGYYEVVIEMNLSDSKKKLVLAGVVCGIVAACLATLGNPANMAFCIACFIRDTAGAMGMHQAEVVQYARPEIIGLVLGAFIISIATKEYRSTAGSSPMIRFILGVIIMIGALVFLGCPLRMVIRMSAGDLNAWVAFVGFILGVATGVFALKKGFSLGRAHVTNKVNGAVLPAIVVAILILATCTTLLKASQAGPGSMHAPIIASLIGGLVFGAFAQKSRMCFAGSIRDIILMKNFDLISVIAGLFVVMLVFNLATGRFVLGFNTPGIIAHSEHLWNILGMYTVGFAAVLAGGCPLRQLILAGQGSSDSAVTVVGMFVGAAMCHNFGLAASGTALNPETKEVVAGAVPLNGKIACIICIVICFIIAFTNKREETKMIYMDNAATTMHKPQEVIDAVVSAMSSMGNAGRGASEAALSASRIIYDTREGLAKLFGAENARQIAFTSNSTESLNIAIKGILDPGDHVITTVLEHNSVLRPLYEMEKKGTELSVIGCNEKGMPDIAAMEAAIKENTKMIICTNGSNLTGNYVDVAVIGKMAHKHGLIFVVDASQTAGVFPIDVQKMDIDILCFTGHKGLLGPQGTGGIYVKEGIQIRPLKTGGSGIQTYSKEHPVQMPTALEAGTLNGHGIAGLHAALGYLEKTGIDNIRKKEENLMWRFYNGVKDVPGVKIYGDYSQKERCAIVTLNIGDYDSSEVSDELLMEYDISTRSGGHCAPLMHEALGTVEQGAVRFSFSHYNTEEEVDTAIRAIRELAEEPMNLKQLEAFVQVAEGGSFSKAAKQLFLTQPTISAHISSLEKELNARLFVRNTKEVKLSDDGKELYRYARQMIDLQKKIEERFETGKSESKHLITIAASTIPAQYLLPEILMKFNERYPKEQVKLLETDSSQVVTKIIDHMVDVGFTGTVLEKKHCKYIPFYKDELVVITPNTEKYQVLHQNIEDISWISGECLLMREEGSGTRKEAGKQLRNAGINLDKLKIIASIENQETIKKSVKQGMGISIISRLAAEEETKSGDLLTFPIPKADQGRDINLVYNKNYQISKSAERFVKVVKEVYGIEEMKNIIIGTAGHIDHGKTTLIKALTGRNTDRWEEEQRRGITIDLGFTYFDLPGGDRAGIIDVPGHEKFINNMVAGVVGMDLVLLVIAADEGIMPQTREHMDILNLLGIEKSIIVLNKCDLVDEEWLEMMEEDVREELSGTFLEHAPLVKVSAATGAGLDDLVKEIEHQTRDEVVQKDIHTIPRLPIDRVFTLSGFGTIITGTLVSGTITKEETLQMYPVGKECKIRNIQVHGEDKKECYAGQRVAINLSNVKKKEIKRGCVLAPPNSMKNTDLLDVKLNVLDSSVRILTNHTRLHFFTGTSEVLCRAVLLDKEEIGPGESGYVQLRMEEEVAVRRGDKFVVRFYSPMETIGGGVVLEPNPKIKRRFQPEVIEELKRKEEGSSADVIEMHVKSHAETLITVTELAKLTALSPEEVEQDVKELEEQGSIYAFPMRKDTYVWHSDSAREAERILLKALKEYEETYPYRYGIKKAQVQTTYFKKVKPNVYDKILTLFEEQGVLKRVDEFLCTPEYEVRKDKIYDKVSKIMLDTFEKAGFDFARYSEVTCKDVPQDIMDDILNILLEEKQIVKINDEMYTLTSYMETAKEKIKEHLKEDPLITIAQVRDMFETSRKSAKPILEYMDSIKVTKKTGAESERVAYMNKNVLYRSIPKVDILLADEGIKVLIEAYSRESVMEAIHSEMEKLRAYIGTCDDEEKAKHQIALLNENIAKAVAAMHTPNMKKVINGTGTILHTNLGRAPISYEHMMKAAEIVSGYSNLEYNLEAGRRGERYSHFEKLLCKLTGAEAAMAVNNNASSVLLILSSLAKGGEVIVSRGELIEIGGKFRIPDVMEQSGASLVEVGTTNKTHYEDYEEAITEETKALLKVHTSNYRIVGFTESVGIDELVPIAKEHEIPVVEDLGSGVLIDLEKYGLTHEPTVQESIAHGADVVCFSGDKLLGGPQAGIIIGKKKYIDMMKKNQLTRALRIDKFTAAALEMVLMEYLSEETAVQNIPVLRMIATPLEEIEKEARSFVRILRHTGMDAKIQMVSCESQIGGGSLPLERMESRAVAIQPNGMSVAEMEEKMRHLEIPIIPRTINDSICLDVRTIERKDYKMIAAELAELLGKKEERMKSDVKLTSLSKTAGXAAKIGPETLAQVLSKLPKFEDDNLIVGIETSDDAAIYKVTDDIAMIQTVDFFTPIVDDPYMFGQIAAANSLSDVWAMGGEPAVALNIVGFPNCLDPAILGDILAGGADKVKEAGAVLVGGHSVQDDEPKYGLCVSGFVHPDKIFKNYGCRPGDILILTKQIGSGIVNTAIKAEMASPSAIREAQTVMASLNKIGKQVVEKYDVSACTDITGFGLLGHCVEMASASDVTFELSVHDIAYLQDAYDYAKMGLVPAGAYKNKRYSINQVEVGSVEETYLDLLYDPQTSGGLLISVSPKEYENMMRDFRASGLDTTVSVIGTVAPKSDKLIRLFMITVNAMGDNCPIPVIKTKKAMAALTGPETIEVLVDNEIAVQNVTKMASSSGGKVTSEKLGDAEYKVTIEMEGAPAADGAEAVCAPDARDNTVVVVSSDRMGSGNDELGKVLIKGFIFAVTQLDTLPKTMLFYNGGATLTTEGSDSLEDLKSLEAQGVEIMTCGTCLDYYGLKDKLAVGTVTNMYSIVETMAKAGRIVRPSMFVDTHMHEMTCSKDSFLKLEEMVEIAREKGLGAICITDHDDMGLKEYAAEYSKKTGFPIFVGIEFFSLQGDIIAFGIEEYPDERISAQDFIDLVKAQGGFCFAAHPFRNNNRGLEENLRTVKGLDGLEVLNGSTSVEACQKAARYAQELGLCTMGSSDCHVPEKVGACATWFPKEVKTMEEFMQALKKGGMKPAYYEDGAYHILEVQEYGNGYPKVGFMENTMKNYEDVDSWKTIMFLYNSALKEVGTKLEILNDEFQHVHKYNPIEHIKTRIKTPESIVKKLRRYGYEISIENMVKYINDIAGVRLICSFTSDIYRLAEMIGNQSDLKVLSIKDYIKNPKESGYKSYHMLVSVPIFLSDSVVDTKVEIQIRTIAMDFWASLEHKIYYKFEGDAPDYISRDLRECAEMVSTLDEKMLSLNEAIQECLEKQEELNMSTKTKESNRQDQRVLQGLDMMGTGRIHMYYGDGKGKTTAAVGQAVRAAGYGLQVLFFQFLKDNSSNERKILEAVPGITCLPGRDQVKFVSRMNGDEKAELRHYNNKALDEIVKFCTNFDVLVLDEALCAIHLNVLSEEKIKSFLEHKPRGLEVILTGHEVSQDMLDLADYATMMMKVKHPYDRKVMAREGIEFMEKVKKALDRIFIEGLSAMAHGLFATLIIGTIIQQIGTFMGGNIGEMIFIAGKLAASLTGAGIGVAVAYKFKEAPLVVVSAATAGMAGAFASSILAGKVFVDGAMVFAGPGEPLGAFIAAYVGIFFGHMVSGKTKVDILVTPVVTIGSGCLVGFLIGPPISGFMSWLGSLINWGTEQQPFLMGIIVSVLMGMILTLPISSAALGVILNLSGLAAGAATVGCCCNMVGFAVASYRENKVGGLLAQGIGTSMLQVPNIVKKPVIWLPAIISSAILGPVGTMVLHMTNNATGSGMGTAGLVGQIMTWQTMIQTESAQMVLIKILLIQIVLPAVVTLGVSEFMRKKDWIKMGDMKLEFMPLQYVYGTLFTSDKTYVINIKVNITGNEIQERERWKKMFRLWGKEFKDNHMLRDTVICDDTDDTRTHKIFNALDSICYEFDLSKPIWLDHNIDEFKRHDKTRFYQDNFVDSIDFDYLEIHIIEEMKVNKNMVSGNSAMLVLKLLSEKDMYGYEMIDTLAKRSNNIFELKVGALYPMLHGMEQSGYLECYNQEVNGKLRKYYRITPNGKKYLERMIEEWNAYRNALNDVLCQTVMSSDIILDVRKLEKNYNTTTHEGKENIYSVLKGISFQVHKGEFISIMGSSGCGKTTLLKILGMLSEPSKGTVLYKGKDIQEIYGENLARIRRTEIAFVFQDYYLMNSLTVKDNIMLPLILNENDLKEGIKSVKKIAAEFGIASLLNKYPYELSGGEKQRTAICRAMIENPELILADEPTGNLDSNTSLQVIKTLVHINETLNKTVVMVTHDPKMASYGKKTFFLKDGVILDSLIKKESNEKYYEKILNKMVQIMNRLFRNILKENKNDYIRTVLGCSWIISLIYFSTAVGGCLSYISTGTIPQMTYLILEVEKEFLIPYGLLLFLLILLLSGYIRKRAAIYKTLTVFGMKRKHKYRFVLFEYLGIVGFSIILGIVLGICESKALKIILEYFFVNIKGDIRYGEAPLKLTLIISFLIFGLGFIVCDQIISCLGIDYLVSDESETRQRTIVNIKMCFVTIMMAGITIISLMTYWGKSGNTIPTLLAVITILLFLYFYGAYFIKRFERGKGYYKKILWIDDWCSNFYRHINISYIAGAFIYIVIFTFSFEIIDTLPIVQKENYPYDLVWGANKTDKDFLNKLERKYGIEVKCIPDIRVTAGDYGEHTGISASEYQKLTGEKLKLHNHEIYVVYQRNKAEYGTLGIDYGKKEPRLYIGNSDADIWVYTMQVMPGNQFTRDYKIVGTTNRIITGNFKSRQLEESGIKGKVFEEIIVFSDAEYERISKTARGSDLTVAINIPQNYNRVVNDIYKYAEKNSQVNFFDYKYGNLIYEKKELIVEEQEANMLKVSAMIINIITLAICIIFTLYNNIASYKNKMRWKYTFFYRMGMNKVKMKRHLNREILLTTEIACISSIPFAFIMVLIKILYKDLSIYWTIRYIGESLLVVVVLTIVIHFMVYGMANNVKKQIERSIQNEQMKKLGNAILMIDIPFNIAGIILCMWRINIMLHSDLQRLIDEKGGIGAVNTLIVVGAVCCCMFLVLNIICAVGRARHKESMIAEGMTGISFLIKIMCIIFWAVYRLFLMNWNDLLRMSINSLRRRKLRTFLTVLGVLIGTASIVVMISLGLGMQQSLYKEVEQSGGLTSITVTGSDNSDGMTTESMGSGQETEKRIDDQLVEKISKMDHVKLAAPIYETSVILLKGSYMAQVQLQGMTPEGLKSLNMDLGDGTLPKTGTGHLELIFGNGVITDFYETGSGNGYYDTGKVPNINLMKDSLFMITDTENYNSDSSTAFGDSTDGTAGAGSQSDSGTGQTKPVQKYVVRASGVINGGLDDYSNNYDSVFCDLETLKQLLRKEYAGKVIPGQPKTKAGKALKGFYYTSLKVKADDIDHVNEVADVIRNMGYNVETNAEYLDSMKSQFAIVQAVLGGIGAVSLLVAAIGIANTMMMSIYERTKEIGVMKVLGCSLRNIREMFLLEAAFIGLLGGIAGNILSFVMSAAINIIVGSSGAMSMGTDSTISYIPWWLVLMSMVFAVLVGVLAGYFPAKRAMKLSPLAAIRNEMQKRIQKETGNNCLKRIIVAFLAVIMMTTMLHPQMVQAATGITIESKDNKVLTYKAGEKKTWTFTVTNHSENPMNNVTVTPDLGDDNDVWPFKTEMQSYQQNIGTLESGESNSKEVKFDFTQREDVQTSRYTLKFKVTADGQEEAEKQFYVNTTAKPVQKDTDDGKDTGKGNGAGSGSGTSYQTPDAGGYSNGEAAYSGEAGGSTDGDAASGNGSVPRVIVTGFTTDPAEVRAGSNFKLTIHLKNTSKMKVSNMLFDLSAPTEGSDEQTTSPAFLPSSGASSIYLDSIAPNGTADISIELNAKSDLLQKPYNMELSMKYEDPNATQVEGSSSISIPVKQDARFEISNFEISPQSVAVGEEANVMCSLYNLGRIKLYNVKATFEGKNIKKSEVFIGNIESGATGSIDAMLEGKKISDGPAKVTMTLSYEDESGNISTTTKDLNLEVTEKVDDDEAAASDMPEETQKSFPVIPVVIAAVVIAVVAAVVILKKRKKKQLAEIEEEELLDELERSSEDEHQMRKVIEVRNLYKLYRVGDEFVRALDGVDFEIYEGEFCAIVGTSGSGKSTLLNMLAGLEKPTKGEVIIAGKHIEKLNEEQLVTFRRNHVGFIFQSFHLMGTLNAVENVALPLSFRGVPRDVRVRKANEMLDLVKLGKHKKHLPNQMSGGQQQRVGVARALVVDPDIIFADEPTGNLDSHTSEEVMELMQRVVREQKKTLVMVTHDDHLATYADRVFHIRDGRIIKIEDNRWKKGKEEGGRHAETNTERDRKMKFVRQFMIILAISFVGELLHALLPLPVPASIYGLVLMLIGLQTGILPLNAVNEAGGFLIEIMPMLFIPAGVGLMVSWGALKPVIIPISIIIVVTTILVMAVSGRIAQFILKKEDKKHEMSKLLQDSAFFCLAISLIGYEIGIILRQKTKLALCNPLLISIVFVIIILKVTNIKYEVYEDGSQLLSYLLTPSTVCLAIPLYQQMGLLKKNMKAILAGILSGVFTSLAGVWVFSTLFHLDKQIYATLLPKSITTAIGMGISEELGGIVTITVAAIIITGIIGNMFGDVICRLCGIRHPIATGLAIGTATHAMGTAKAMEIGEIEGAMSSLSIAVAGLITVVGSTIFYQLYMEKTIICIGREYGSGGHAIGKILAKRTGYEFYDKDRFIAIAKERGFEGEVEEYLEEQPMNSLLYSIALNYSRPKKKPFPFELVEELAAEKPCIIIGRCAGYLTHGQDNAFSVFVHADMEKRIATVMAHDHINSRLKAKRKIEEIDEKRSAFRKEFTGQEWGQSKYYNLSVDTTHLTFDQAADLILYYKKLAEESHEMIKVIGLNIKVLKKEPFSGSHQGMRFFMRAEDDTLHVWVYPEPWCFEKTSDDMKTAKDFPFTQEGLDDSMEWISQEFENRKDYWMQMEKDKMKMILQGRGDSMKAMQAKGEYCITAGEFAKMCQTTRDTLRYYERQGILVPKKNPVNGYRYYSYAQISSYYFIRTFRGLDCSVGDIKEYLLGGEEIRFDEFVEQQYDKLLLMRQELDRKIRTIAGTRQILDQIRIADQGHPVIREIGVSWYFIFTEVISKPATSSGEIEKDIRRHLKRCDNPGIQAFPMGASIDKEQFLRENYTYKNVFSFTEEGCRNKEDIVEMEPGEYLAAVCRESDGDIRDTYREIKDLMKKESKQFDSDIYSLSIVNVIDPNEEHKYLKYIFAKVKQIMNILKKIYCRIFQTCFRIALPVLPYREPELIDGFKHVPEVLKKHHISHILLVTDPGVYKLGLTKPLEKQLLKSEISCTIYKDTVANPTSANIEEAKDLYLAHGCQALLAFGGGSSMDCAKAVGARLARPNKPLAKMEGILKIWHKLPLLIAVPTTAGTGSETTLAAVITDADTHHKYAINDFNLIPDYAVLEPSVTYGLPPQLTATTGMDALTHAIEAYIGRSTTKQTRAASIEAIQLIFDNLQTAYKNGNDKTARRNMLRASYLAGTAFTKSYVGYVHAVAHSLGGCYGIPHGLANSVLLPIVLKAYGTAAHKKLARLARITGISDSKLDAVAAEEFINHIRSMNISMNIPETLDGIRNEDIPKLACYADKEANPLYPVPALWGPEKLEQMYHLVQEVSEHDRNRNSEHPGKAAMTETEIQNILEKQHKFFQTGQTLPVNYRIEQLKKLKDSIIRHEPDLNLALKADLGKSETESYMCEVGLTLSELSWMLKHIKKLTKEKWVPTPLAQFAAKSFRSPSPYGTVLIMSPWNYPVLLTLEPLIDALAAGNTAVVKPSAYAPATSRVMQEIIEECFSEEYVAVVTGGRAENQALLNQRFDKIFFTGGKTVGREVLRHAAEYLTPVTLELGGKSPCIVDSTAKIPLAARRIVFGKYLNCGQTCVAPDYILCDKAIRDQLIDAIKSEIRRQFGKHPLENPSYGKIINRKHFQRLQGLIDSSKVIIGGQSDAKILRIAPTVMKNVTWDDAIMGEEIFGPILPILTYESLDEAIQTVESHPHPLALYFFSEDKAAQKKVLDRCHFGGGCINDTIIHLATSAMPFGGVGESGMGGYHGQAGFDEFTHYRSIVDKKTWMDLPVRYQRYNKFKRKMLRMFLKMYDGMCAFDLLPYSYPKKLQKFGIKCKMSNKIRPFVSTIQNNRDHRKICVIDGQTGYVGGVNLADEYINEKERFGHWKDTAVLLRGDAVQSLTMIFLQMWDVDMRGVEPYGKYLTKKAESLNDRLGYVIPYADSPFDHENVGEEVYFHILNHAKKYVHIMTPYLILDNEMLTTLIRAAKSGIEVIIIMPHIPDKWYAFAVAKTYYKELIEGGVQIYEYAPGFVHAKVFVSDDDTATVGSINLDFRSLYLHFENGVFIYDNPEVQKVEEDFQNTLAKCHKVTVTEVRNRGVFMKVAGQVLRLVAPLMMVKAVVGANWGDEGKGKITDMLAEQADIIVRFQGGANAGHTIINDYGKFALHTLPSGVFYGHTTSIIGNGVALDVPVLFKEVQSIIDQGVPMPKILVSDRAQMVMSYHKNFDAYEEERLGGKSFGSTKSGIAPFYSDKYAKIGFQVSELFDDELLKEKVVRVAEQKNVLLEHLYHKPLINPDDLYNELQEYKKMIEPFVCDTSLFLNNAIKEGKEVLLEGQLGSLKDPDHGIYPMVTSSSTLAGYGAIGAGIPPYEIKKIVTVCKAYSSAVGAGAFVSEIFGDEADELRRRGGDGGEFGATTGRPRRMGWFDCVASKYGCRMQGSTDVAFTVLDVLGYLDEIPVCVGYDIDGEVTTDFPTTHLLEKAKPVLKKLPGWKSDIRGIKKYEDLPENCRNYIEFVEEQIGYPITMVSNGPERHDIIYRESKLSKMKNAKRILALAAAILLFGMYLSTLIFALIGSPHSIDLLWASIACTIVLPVLLYGYMLVFKLTRHNTPSDDSADSFHSHSSDDVSKLSQSHDQASDDTIMSTLYQQWQDLAYDETADRSQLEKFWGTYFQIEKEIYEKLLSNPDEVVKGTVKELAEKFGQEVLTMIGFLDGINESLLIEIDLDTVEEDTVVSLAFDKERLYKNMVAAKADWLYELPQWKEIFSEEELKKFYKEQKESTTIRKPKKIGRNDPCPCGSGKKYKKCCGRMLWQIIFLVTGILSLIYYSEICIALKKWDSTFSRFWLATGIVGIAGSALIRLYGMPCIVEAMIGISVCFLLIAEIKIIKGMHRKPSGKRKEHFEEDTKTGSATRWIIVLGAQVRGRKITDSLKRRLDCASEYLKEHPDVHVIVSGGQGKDEEVTEAYAMARYLECEGLDRRRIVQEDVSVNTLENLKFSRNLIADVDTPVGIVSNNFHVYRGCVYAKRAGFKEPFPIPASCHPLLFPNYFVRECFAVWKLWLKKYMKITLKDGSFKEYEGSMSVLDITKDISEGLARVATSARVNGEVVDLRHVVSEDCELEILTFDNEEGKGAFWHTTSHIMAQAIKRLYPDTKLAIGPSIENGFYYDVDRETPFVAEDLEKIEKEMKKIVKEALPIERFTKTREEAIAYFKEKDEPYKVELIEDLPEGEEISFYQQGEFVDLCAGPHLMTTKPVKAFKLTSLAGAYWRGSEKNKMLTRIYGISYPKKALLDEYLTMLEEAKRRDHRKLGKELGLFMMCEEGPGFPFFLPKGMVLKNTLLDYWRELHKKAGYVEVSTPIILSRHLWETSGHWDHYKENMYTTQIDGEDFAIKPMNCPGGMLVYKAEPRSYKDLPLRVGELGLVHRHEKSGQLHGLMRVRCFTQDDAHIFMMPEQIRDEIKGVVALIDEVYQLFGFKYHVELSTRPEDSMGSDEDWELATEGLRGALNDLGLDYVVNEGDGAFYGPKIDFHLTDSIGRTWQCGTIQLDMQLPQRFELEYTGADGEKHRPIMIHRVAFGSIERFIGILIEHFAGAFPTWLAPVQVKVLPISDKHLEYGQKVLDTLNAAGIRAEIDTRAEKIGYKIREAQMQKIPYMLVVGAKEEEENLVSVRSRFAGDEGQKSLDEFVASVTEEIATRARREVVKEENMPDLRCTVQTCTHNQNYYCNLDSIVVGGNSAKKADETSCDSFEERKGENSYSNAYSDMAGKEASAKSDVDCKATDCMYNKECQCHAGKISVEGGNACHCQETECATFKCGCAMNKEENTYYKNSPKFGRKGPSKLRQQFNRGMTYFLVIVACILVYFAMLRVEAISNTLSKILAILKPVLYGCGIAYLLNPIVKSVDAYLVPVLEKHMKKKEKAKKVSRSIGVIVALVILITVVSTLINMLIPELITSIRNLIFTLPAQINQLVKEINNIQLDDSTTTAVLKNAMNEASASLQKWMRTDLLDKVNEVMTHLTVGLYTLIMEMFHAVIGVIVSVYILFGKETFINQSKKAAYAIFPAERANLLIHIAVKTNEIFGGFIIGKMIDSIIIGILCFIGTSILKMPYAMLVSVIVGVTNVIPFFGPYIGAIPSAVLIALADPMKGIYFLIFILLLQQFDGNILGPKILGNSTGLSAFWVIVSILLGGGLFGILGMLFGVPTFAVVYYIIKLLLDNQLEKKKLPTDSDCYNGDSYVDNDGTYFQKRDDGAETEEQKIEKNKEEKGEMPIRVQNDLPVKEILESENIFVMDEHRATHQDIRPIKIGLLNLMPLKEETELQILRSLSNTPLQVDVTFVAVASHQSKNTSKSHLNKFYQTFDEIKDRKFDGFIITGAPVEQMPFEEVDYWDELTRIMDWTKTNVVSTLHLCWGAQAGMYYHYGIDKVQLDKKAFGLFWHKVLNRKIPLVRGFDDVFLAPHSRHTETPLDKVRADKRITILAESDEVGLFLAMAQNGRQIFVMGHPEYDRVTLDGEYKRDKSKGLPIELPKNYYQDDDPENGPLLTWRATANNLYTNWLNYYVYQATPYDLEGTPDFTWKMELLNAIVITVNGVVWGWPMIILLLGTHIYMTAKTGFIQRFTITKGIRLSVEKDTKKYIHNLDAKDDTPVPVVKMKKKMVTVLLTAAMVTAMAAGCGKSSDSGSDKKESYTIGIEQFAEHGSLDNCREGFLKGLEDEGIKEGDNLTVKYKNAAADMGTAKQISDSLVSDKVDLVCAIATPSAQSAYNAAMKADIPVIYTAVTDPVAAELADKDGKPVGEVTGTSDKLPVEEQLKMIRKMLPDAKKIGIMYTTSEANSVSAIEEYKSLVKKYDFELVEKGITTTADVSLAADDLLSKVDCITNLTDNTVVASLPTILDKANEKKIPVFGSEIEQVKIGCLAAEGIDYIALGKQTGKMAAKVLKGEAKASEQNFETITEPGFYVNNKVAENLGITVPDDLANNAVESFDEITAEMNFITSILEQGLIYGILALGIYITYKILDFPDLTVDGSFPLGAAITAALLTRGMNPYIILILSFLAGAVAGICTGLIHVKCKVRDLLSGIIMMTALWTINLYIAGTANVPLFSQKTIFKNDLMDKIIPDALVPYSTLIIILVLAVICKVFLDLYLNTKSGFLLRAVGDNDVLVVSLAKDKGNIKILGLAISNGLVALAGCVFAQEERVFEISMGTGAMVIGLASVIIGTSIFRKLTLLRTTTAVLIGSIIYKACVAIALRNFDPQAMKLVTAVLFLIVLIISMERKKKVNTNAMLELKGIHKYYNPGTVNEMCLFQNFNLTIDNGEFVSVVGSNGSGKTSMLNIICGSIPVEGGQILINGSDITKQKEFKRNQRIGRVYQNPAMGTCPSMTILENMSLADNKGKVFGLSRGTNKSRIEYYREQLSQLGLGLEDKMDVKVGALSGGQRQAMALLMSTMTPIEFLILDEHTAALDPKTAELIMELTDKIVKEKNLTTIMVTHNLRYAIEYGNRLVMMHQGNAILDKKGEEKDKMSVDDILALFNEISIECGNMAKRIAKFEKVSFEQFKGGYTDAIGEASDEQIREVYDSLKLPKRATKGSAGYDFYAPAAITLKPGETAKIPTGIRAKMEDNWVLQCYPRSGLGFKFRLQLNNTVGIIDSDYYYSDNEGHIFAKITNDTNEGKTVEIPAGTGFMQGIFMEYGITVDDEVEEIRNGGFGSTTKMTRQEIPVFKTREENVAYMNETLPIQESFDLIQRDLLIGGRVSSFYFVNGFTSEETMLKIMDALLKVKEEEMPEDVWEFANACIPYVEVEVLFDFDQILKSLLSGETCVFIDGYRACIVIDCRTYPVRSVEEPDKDKSLRGSRDGFVETLVYNTAMMRRRIRHPALIMEMMEVGDSSRTDVALCYMGDRVDKELLKNVRDKIRSVDTDDLRMNQQSLAECLFRRKWYNPFPKFKFTERPDTASACLLEGKVVILVDNSPSAMILPTSIFDMIEEANDYYFPTLTSVYLKISRTLINLMTIFLTPVFLLFMQNLNWLPKVFAFVAVKDTVNIPLIYQLLMLEVAIDGLRLAALNTPSMLSTPLSVIAGLVMGEFSVASGWFNSEVMLYMAFVAVANYTQPNFELGYALKFMRLALLVLTALFNWWGFALGCILVVCSICFNKTLSGRSYLHVSLKMNHRDERLGSAPLGKLMFSLAVPSVAAQLINVLYNIVDRIYIGHIPGYGDVALTGVGVTFPILTMISAFSAFAGMGGAPLASIQLGKKNKQGAEQILGNSAGLLILFSVILTAFFSICKTPILYAFGASDATIVYARDYISIYLIGTIFVQLALGLNAYISGQGEAKTAMLSVLIGAVLNICLDPVFIFVLHLGVRGAAIATILSQAVSAAWVVHFLTSEKTVMHLSLKNMRLRADVIKMIAGLGISPFIMQSTESLVTITLNTGLQRYGGDLYVGSMSILMSIMQLITIPVQGITQGIQPIISYNYGAGNKERVKDTMKRMILVCLAGTLLLAGVAILAPQIYTGLFTNNQELLKLTCQVMPVYFLGISIFGIQCACQTSFISLGQAKVSLFIALLRKIILLIPLAIILPKFMGVMGIYRAEPIADVISVVTTSVVFIYTMKKVLRNMMSEYVITINSTSDLPKEWVWERKIPVVPLNCTIGGNTYRDMYDLSADEFYGMLRAGEMAVTSQPSPQAAIDMLEPILKEGKDILHLSFSSGLSGTYNSMCIAAEELQEKYPERKIVVIDTLCASLGEGLIDYKALELQKEGKSLEEVAQWVEENKLKICHFFMVEDLNHLQKGGRISKTAAVLGTMVQIKPIIYLDNEGKLQIIKKERGRKKAMNKIVDMAIDACEGKMPDMVMIPHGNCPKDAEYVAELVRKKMGVTNIMMNDIGTVIGGHTGPGMVAVVCMGVHRMINGQIRDKEIRVIGENGDQLGIMSPREAMKLAQEADLDLVKIAPKAQPPVCKIIDYGKYRYELARKEKEAKKKQKTVEVKEVRLSPNIETNDLNTKVNNAKKFISKGNKVKVTLRFRGREMAHVQQSKHILDDFAQMLGDIAVIEKPAKMEGRSMSMVLTEKRMPKIKTNRAAAKRFKKTGTGKLKRNKAYKSHILTKKSTKRKRNLRKATIADATNVKNMKKVLPYLMARIKGGLNAKKRHNRTLKLAKGYRGARSKQYRVAKQSVMRALTSSYAGRKQRKRQMRQLWIARINAAARMNGLSYSKFMHGLKVANIEMNRKMLAEMAVNDAEGFATLAEAAKAALAMEKIASFTVDHLRLVPGVYVSRVDQVAGNPITTFDLRMTRPNKEPVMNTAEVHTIEHLAATFLRNHAEYADKTIYFGPMGCRTGFYLILAGSYESKDIVPLLKEMYTFMAEFEGEVPGAAAKDCGNYLDMNLPMAKYLSKKYLTEVLENITDEQLNYPAMKRCDILNFILALEVNAVNSVCGVYSWMEKGILGGKIRRMKLYLVRHGETDWNKVKRIQGQVDIPLNQFGKRLAEETAEGLRDIPFDLCISSPLSRAHETARIILYGKDIPIIKDARIEEMAFGEYEGKCCARDNWELPEDFHKFFNDPAGFVPGKGGESFADVKKRTGEFLKSLYKKTEGVYENILITTHGAALAGMLNNIRKEPLEKYWGIGVHSNCGVTEVEVKNGEATILSENVTYYEETVRPWADKMAIETVGQQKYADLTAKRIKSLQTGMIIWISLFCLALICSFSNNLLAIIVGIVAVVYAVVNTKGRKAFNSKLDKIEDKNEFYRQIVAPDVLELKEEQLLVAKDYVIVVDADVWIYDLHHMEKVEVGKQGNVKKTLFLTEPNGKRHAILSTTKGDGRQEAFDQVYYRLHDRLAVMISTSNVTLRVGKKALFEDVNIKFTEGNCYGLIGANGAGKSTFLKILSGQLEPTNGEVIITPGERLSFLQQDHFKYDEYPVLDTVMMGNARLYEIMKEKEAIYAKEDFTDEDGMKASELEGEFAAMNGWEAESDAATLLNGLGIPVEMHYEMMKNLNGPEKVKVLLAQALFGNPDILLLDEPTNHLDLDAIAWLEEFLINFDNTVIVVSHDRYFLNKVCTQIADIDYGKIKLYAGNYDFWYESSQLLIRQMKEANKKKEEKIKELQEFISRFSANASKSKQATSRKRALEKIQLDDIQPSSRKYPYIDFRPNREIGNEVLTVEGLSKTIDGEKVLDNISFTLNHDDKVAFVGSNELAKTTLFQILAGEMEPDEGTYKWGITTTQAYFPLDSGSEFDNDYSIVDWLTQYSEEKDATYVRGFLGRMLFSGDDGVKKVRVLSGGEKVRCLLSKMMISGANVLILDEPTNHLDMESITALNNGMTKFPGVLLFSSRDHQIVQTTANRIMEIVPGGKLIDKITTYDEYLESDEMARKRQTYTVQEEDNMVKATLVLEGGANRGVFTSGVLDYLMEKDMYMSNVIGVSAGACNAVDYVSKQAGRSRECVIHREKEYDYVYGLKKTLKEKALMDMDMLFDKFPNEIYPFDFETYFASEMECELVVTNCITGDAEYLSEDKDPERLMKICRASSSMPLAAPIANVDGIPYMDGGLADSIPIEYALEKGNDKIVVVLTRNPGYRKKRAVKATEQLYKRAYKKYPNLVRTIMTRNAVYNKQMKLIEKLEEEGKIFVIRPLIPTVSRMEKDYDKLQHFYMHGNRLMKKEYQGLLEYLNEMEPRTLLDFMGVAERLKCNMRHSRTAENRRESVAEHTYRLCVFAWLVKEEFPDCDMDKVMRMSLFHDLGEAVTGDIPAFVKTDSDREVEESAISNVTVMLPERERKELDALFDELEKAETMEAKIVHALDKMEALIQHNEADIATWLPLEYDLQMTYGEKECKADPYLAKLREVIRQISADKIASEGEERGQSYYIRKGVENMHLEEVAALLHRTDWAKDRTEELIRKSMENACPYGLFLSDCISEGGKDRQIGFARVLTDGVTTFYLMDLVIEEAYRGQGFGTIMMNQIMKENGHLYGMLHTQIAKAFYERYGFREIGNTKKTEEIYMEKPCGMTPLNEQAYNYLQKLIMENHFSYQEVYSETKLSKELGISRTPLRDAVHRLAQEGYIDIIPSKGFMLHQMNRKDVNETFQVRSALETYCTVQISKASSTRKAKKLFKELDWIMECMNDIMETTHSIKEFSEYDFQFHTKIIDYLENEQFSNVFAMFMYRMKRLAELSLAHKGRMEQTYEEHMAILDCMKNGDTSHIYEITLKHMETPRDINLEDLMKVGFIGLGIMGRPMAKNLLNAGVELLVSDLNKEAVADVVAAGAKEATYAEIGEQCGRIIIMVPSGAISKSILFDEDGVASTIKEGTVVCDMSSVTPVESKECYEGLEDKGVGFVDAPVSGGEPGAVAGTLAIMAGGDQEDFDAMKEYFDILGSSALLIGGSGSGSVTKLANQVIVNNTIAVVSEAFVLATKAGADPEKVYHAIRGGLAGSAVLDAKIPMIIERNFKPGGPIRINHKDIKNVVNTAHSIDVPIPYTAQLYEILQTLKIHGHMNDDHGGIVQYFEKLADVEVKKTEEMALNAEVLTSYKKIDEAYIDELLKKEIEKNNKKIVVLDDDPTGVQTVHDISVYTNWEKDTIRQGFDEENNLFYVLTNSRGFTAEQTTKAHNEIAAVVDEVAKETGKEYIFISRSDSTLRGHYPLETELLKKNYEANTGKTIDGEILCPFFKEGGRYTIDNVHYVKYGEELIPANETEFAKDKTFGYSAATMPEYVEEKTKGAYKASDVTCISLEDIHDMNIDKIEEALMEVKDFNKIIVNAVDYADVKVFCVALYRAMAKGKVFMFRTAAAIVKVMGGVTDQPLLSREQMVVKETENGGIIVVGSHTDKTTKQVEELKKLTDIEFIELDATLVKDDEAFEKEVKRCLDLEETCIKAGKTVCCYTTRALITADTGDKEDELRLSVKISDAVQSLVGRLSVTPSFVIAKGGITSSDVGTKALAVKKANVLGQIKPGIPVWQTGEESKFPLTPYVIFPGNVGEITTLREAVEVLTAKMVNGLSGERMLIGLVIGIAVLIFLVLKTKIQAFLALIISTVVMKEYLVCGCFFLIFTMLLYALGKAVDIKEESYSVKFIKGYLVYSFFVAIGGMSVQLLHLKYRIFFAYMSVVLLLAALKIIYSIKQENYIKIVTLKMSIFIRILLVVGAIVLLAFMLRKIRLAKLKIEYTVFWIGFSCILVVMGVFPQIMSAISKFLGFKSTVNMVYLIVIFVLIVKLFYNTIQISALENKVDSLAQQIAIDRKIDAEEKKGEMKSELLIVIPAYNEEENIENVVTFIKNKYSQYDYIVVNDGSKDRTADICRSKGYEMLNLPVNLGLAGAFQAGLKYAYTKGYSYAIQFDADGQHRPEFIEPMLNRIKEGYDIVIGSRFINQKKEKSLRMIGSKMLTVAIKITTGKRVADPTSGMRMFSHKMIKEFAQNLNYGPEPDTVSYLLKNGAEISEVPVNMDERVAGESYLNLTNAAKYMVKMLISILFVQNFRKRGMKEYKKKIEFKEIQSLEYNLLKRFDEFAKENNIMYFLSGGSCLGAVRHQDFIPWDDDIDVCMLRKDYDKLIALVKDNRYLDTERKYKFLLPLDDNYIYPYMKLVDDSTIVFEKDIKRQYATGVWMDIFPMDIWPDEKETLRKIMKKHRFYKMMNKIYVAGNLTTMKKNILNIIGKGAYKILFRNKDYKYWNKKVIDMVTPCEGTYVGDRIWPVEDKEFFSKEVFSEAKYVKFRDGMFPIPVGYEEYLSKMYGDYMKLPKEEDRVFHDFEGYIKMTEVSVIMATYKEPENQLRRSIESILNQTYKAFEYIIILDNPDNSDHIRIIKEYQQKDNRIQFHINEKNQGLTYSLNRGLSYANGKYICRMDADDISVPERLQWQKEYLEKCNVDLIGGITQVIDEEEKVIYSIKKIPANPDKIKKCIRYNQVVPHPTWFGRKEMFEHLNGYRKIPLCEDYDFTLRTLLKGYRVSNLNKVVLQYRMTSQSISRNNLFEQFLYAKYITCSYKKGKIADVEKAKQYVTEKNSSKKAEKYLKANVRFNELLNDIEQKRYIHFFVDGVRFTFTSKEYLEKVYRFFMVSINSMFDTLQTFIAPRLRSFLKLLSIGHFHKKRIVFFSYFGAQYSCNPKYISEYMQERHPDFEIIWAFKSPQNFSYLHDKGIKTVKYLHPYFLHVCLTSKFIVTNSEIPAWFPIMKRQVYINTWHGGGAYKRVGAAYQKETPGKQIRAEIAREVPCTYVSSSNAFTELTIHQSFHHDGTILSCGMPRNDMLFNNDHPELHDKIRAYYHLPSEAKILLYAPTYRESKAASDYLFDCKAIQSALSEKFGGNWFILFRTHYFVMNQLNNAANYIDASNYPDMQELLYAADVLITDYSSSMWDFSLTRRPCFLYATDLNYYDLDRGFYSDIHTWPYPLAESNSALIKNIKQFNNDQYQKNIQKHWDALGSYESGHACETVANYILTSNTMNYAVIFAGGTGTRMNTKTKPKQFLTLHNKEIIIYTLEHFENHPEIDGISVVCIEGWIDYLKKLIEKYQLKKVKWITPGGKTGQESIYNGLNAMRGQIEEDSIVLIHDGVRPLINEELISENIKVAKEKGNAITVVEATETVMMVNEKNELTQSVERKKCRFARAPQTYIYGQLLAAHDHAREENINSYIDSATLMQAEGYKLFPVMGKPENIKITTPSDFYTFRAIVEAEENSQILGFMIEPQMSVVVPVYSVEKEYFEECILSLKQQTLEAIEIIIVADGVKKEILDLCKSFEGQDERIRVVEQENQGVAVARNNGILNAKASYITFVDADDWVEPEFCAFFYDNFKNNPDVQIISSAAYINKNDEEIENPFWNGEKKYFTGKEKEEMELQAIFKEAASYVPRFATFGTTWAKAYDVEWLRKQNIIYEPELRRGQDTVFNLHAFEMAEKVLYVKRFLYHYRMNSGSTVNKYTEGTIDILERISRYILKFIKEHGKDERFYQAYNNKSIQLLSQSINSDYAHKNNPKNYLTRRKELKTVLRRKCYRDNFKNINTENIPVTRKLYWSLMKYRMVDLIYLAHWVYRKKMEKISVIVPVYKIKEQYLKECIESISKQTYSNLEIILVDDGSPDNCGEICDLYAEKDSRIMVLHQKNQGVSMARNNAIQKATGEWITFIDADDWIEKNMCELAMEKRDGNDMVVWNMYLNKDANQQIKKNYEKDLSVDDEKLLEKINLNFLRTISLSKDEIRIPTLEGPVCHLYKRSIIKENNIRFDSSLKQGEDKLFNYEYHKYIKRFTYINKPLYHYRLHGESTTHTFFAGNADTSTRILKKYYELEPRINTSETYRNTYCVRVGVIAYFLIGKYFLHPDNPNRKNAFREFKILMNEEPYKSAIAAIDLRVMDLNLNKIKLWLLKHRKYRSVFLYYNLVNMIQKIRGVKMVERKMEKSMEEMDLEYIANSDLEWSKYKNKTIFVTGATGLIGSLLVKAFAYYNCLHQGNIKIIGLIRNEEKAKRIYGKWYNNYGIHLMIGDIEQIPVIAGDVDYIFHTVSITASKMMVQHPVLTIQTSYMGTKNVLDLAVDKKIEGMVYVSSMEVYGIPDEKKEYITEKDLGYIELENVRSSYSEGKRICECLCNAYAAEFGLPVKSARLAQTFGAGVLQEDNRVYAQFARSAMKKENLVLRTDGSSEGNYCYTRDVIRALLLLGYSGKVGEAYNVVNEKSHMTIREMAELVANDVSNGEIKVEFDIPDEAKSLGYAPKVKMHLSSEKLNKLGWKAEVDMKEAYLRMMNDMEAMKIVFVILHYLAIDETYKSVDSIEKKIDTDMYKIVIVDNASPDKSGALLKEHYKNDDHVEVLLNQENLGFARGNNVGFRYAEKTWNPSYIVLMNNDVYLLDDDFLEKVEKEYKRSQFAVLGPMILSADGRCDINPIRTNAMSKQEVEHDIQAYKIKSVVYKYHLEKIKNIYRKIKPLKKKKKKEFIKRCEYVQLHGCFMLFSRKYIEKFNGLDDRTFLYREEAILMKHLTENGLNSVYLPDIHVFHREDASTDDMIKENRKKEMFEIKNHLQSLKVLKEVYDFYENKRGENKMKKKQKSIKINLIMNTIKTLMSLIFPLITFPYASRILGATGIGRVNYASSIVSYFSMFAALGISTYAVREGARIRDDKEKFSKFSREMLNINLCTTFIAYCALAVFLALPILGNYKKLLVISSLSIIFTTIGTEWIFTIKEEYAYITKRAILFQIISLILLFVLVKNKNDYYWYAALTVISSGGSAFFNLWHSRKIVDWKQKKERLEYRKHLKPILMIFGTSVASSIYMTMDTTMLGAFRGDKATGVYTAAVKINTIVSTLIGTISATILPRVSYYLGNNLKKEYEKLMKESVDILFMIAIPAAIGMICTSDILILIFSGKEFLTGSTAAKILSAKVVVGAINRVLAYQICIPHKKDKEVLISTIGGAVFNLIANALLIPMFGVTGASVATLFSEIIVFVILTYYARKIFNTKMLYTRVMVYFVASVWFFAGRFVMNMITNSVFITLVGTVAGCCLGYFIILTLIRDPYLKQFETQFFNKIKKIRARMKKLSQSLLANLVTNRRKEKHMTQQDLADITGINRSMISRLEKEDFIPSIPQLEQLGETLDFEPQTLFVDAGNTKLPSPSPLNIAVAGTGYVGLSIATLLAQHNHVTAVDIIPEKVELINNRKSPIQDDYIEKYLVEKDLDLTATLDGESAYKDADFVVIAAPTNYDSNKNYFDTSAVEAVIELVLKVNPNAIMVIKSTIPVGYTESVRKKYNTANIIFSPEFLRESKALYDNLYPSRIIVSTDSSDERLVKASHTFAALLQEGALKEQIDTLFMGFTEAEAVKLFANTYLALRVSYFNELDTYAEMKGLHTKDIINGVCLDPRIGTHYNNPSFGYGGYCLPKDTKQLLANYDNVPQNMMSAIVESNRTRKDFIADRVLNLAGYYDYNNHGDYSAAQEKECTIGVYRLTMKSNSDNFRQSSIQGVMKRIKAKGATVIVYEPTLEDGTTFFGSKVVNNLEQFKKLSQAIIANRYNPILDDVKDKVYTRDLFQRDMYKKMISLTAIMAMIVTLVMPARAYADETQAESQPVLKYSVLMSGASEWQEADNGEYVGEPENKDAEISKLKLDVLDSVTEENLNGITYSVADAEGNWNEYVTAGQETGFDSEQKIAAFKIKLTEELAEKYNIYYRAYVQTDDQSEGQWLGWAENDAPSGTKGYDCGIKAIQVQLTEKSTNVDLDTANSYIVKTDIVPEETVKVVYQARVAKIGWQKKVEDGALAGTEGKALSIEALKIKLAGLSEEDQKDSKIIYKTHVQSYGWQKEVENGALAGTTGQGKRVEAVSVRLEGAIAKKYDVYYRTHIQSFGWLDWAKNGEKAGSSTYGKRLEAIEIKLVKKGESAPGSTKKAYQVPRIQYQTHVQSIGWQKKVSDNQIAGTTGQGKRIEAIKITLPDSDYTGNVEYRAYVQGIGWQSWKKNGELAGTSGQSKRIEAIRVKLTGEIAKYYEVYYSIHLAKIGWCNYESAGRVTGTIDLSKKIEALKICLVKKDAETAPNTSGVKYVEGYKSGNFYYNGYIKGVGATGNVSQGNTVGTIGKKQQLQSLTLYLDQSNKLAPSGTIQYATHIAKEGWKDWSDAGTTNGASTGTNGMEAVKIRLTGNLAKYYDIYYRAHVQGYGWLGWAKNGQAAGTSKIGYRMEGLQIRLVSKDAAAPGKNANYYTEKKKTATIAVKDQMHLRALAYASNTRYLILVDTTANRVGIYSGSVGKWNEVKKWVCTTGAKSTPTVKGTFTVQGKGKSFGSGYTCWYYTQFYGNYLFHSVLYKQGSMSVIIDGRLGINASHGCVRLNINNAKWIYDNIPRGTKVVVYMKSKKRFIACICIMSMILSGISVSAANDAATEEGQSMESSQTDQNQQQMNDEADQEINQEIDGTQEQSELTENPDTPENTTGERTVVSVDGNGNVFDVEEETDGVVKEDLSNKARAAATYIVNFRANAAGASVGNNTTEYKEYSTNAAGYCYGGAGADAAYLGTENGKVKFMQSGVVGLVDQSKVQVVNLNSAKSYSNYYADGSSIIHRICMDMTTPGYGGSVNVGPQQSYMKTGTTYYSYDGHYFYTNYVTMLSDYKSNTRKNSINPNNPYYNYYQYLPLRGKSSYSANELSTIINKHAQSSSKMYNKGAAFVNNQNSYGVNALLMTGVGALESAWGTSSIAKQKNNLFGLNAVDTSPGQSANTFSSVDVCIKDFAETYMSKQYLRAGWAYYHGGFLGDKASGINVSYASDPYWGEKIAALAWKMDSEGGKKDQNKYSIGIKDTVSTAHTTLNVRKEASTSATSLYNTGTSSNYAFLILGESGDFYKVQSDPVLKADRGGIESTSGKYNSSSMYAYASKQYIKKINTGTSGLNGGNTIPDTKKTGVIYSTHIQSDGWQASKANGEISGTTGEAKRIEAIKIQLSNIGYTGSVQYSTHVQSNGWKNWVSDGTIGGTTGEAKRMEAIRIRLTGEAANHYDIYYRVHTQTYGWLDWAKNGEIAGTTDGARRMEAIQIKLVSKGSQAPGSTVQAYVQPLTQYSAHLQTYGWKESVYGGGYAGTTGEAKRMEAFRLKLTDQKYSGEIKYRAHVQSSGWQGWKTNNAVAGTVGAAKRMEAIRIELTGKMAQMYDVYYRVHTETYGWLDWAKNGEIAGTTGCAKRLECIQVVLVKKGAAAPGNTQKTHVIKMFVNGQSVGKGRKQQSGVFVWDDVKLDDMNTIKAVGTSDGQTYSDEVSGIKAENKNSATSIKYQTHIQSIGWQEAKKDGQTSGTIGKGLRMEALKVKLQNKKYGGNIEYRTHIAQKGWQDWKKNGQTAGTTGEKLAMEAVRLKLTGELAEHYDIYYRVHSQSYGWLGWAKNGEIAGTAGLAKRMEAIQIKLVEKGGKAPGTSEKHYVSNQGVFYQSHVQTYGWQTWKQNGETSGTSGQAKRLEAIKIKLQKMKVSGNIEYQSHVQTYGWEKSWKKNGQLSGTSGKAKRLEAVKIRLTGEMKNKYDVYYRVHAQSYGWLGWAKNGEKAGTEGLAKRLEAVQIVLVEKGGAAPGSTEKTFIKKMIPICFIEIKCIFFCRXXXXXXXXXXXXXXXXXXXXXXXXXXXXXXXXXXXXXXXXXXXXXXXXXXXXXXXXXXXXXXXXAFESMNNMSLIQTPDIPRNVYLSMHHQKTMKNFHPSLRVDLYMKRIMTVMLAVIYITTGTISVMAGEPENNDAQKKESVSDSVKVQTSENTDEDRPKENSWRYSNGELIPQEDDATSNARAVTNAWKKVNGQFVNSLGKPIPGAKKKGMDISEYQGTINWDTVKNRSDIDFVIIRCSYGSGYKDRKWEYNVKECERLGIPYGVYIYSTATTVLAVEKEAENVKKMLEGHQPTYPVYFDMEENSVLNLGSSTIGKLANTFCSKISGAGYKVGIYASLYWWNSILTDRVFKNESWSKWVAQYSASCQYQSKYDMWQCTSSGKVNGVSTNVDINFWMSDEPVINQDADRVIVSDENIITYTSHMQSYGWQEPVNNGYQTGKPGYGKRLEAFKINVGGGYGDLGVRYQACIQDEGWKPLAETGQLAGTEGKSKYIQAVKISLTGSQAENYDIYYRVYSQNFGWLGWTSNGQPAGSQGYEKRIEALQIAVLPKGATIPGTTDNSYKTTGKKVEYRTYVEKQGWKKYSADGEQSGTIGQARAVQGLAVRVNDTQYSGNIVYDTYMQSYGWMGEKANNTAAGILNGGKRMEAIKLHLTGELAEKYDIYYRVHTQTFGWLDWAKNGEPSGTKDYAKRIEAVQVKVVPKGNPAPGATSIAFKEAKIAYKTHVQTYGWMSKVHDGETAGTSGKAKRMEALNIAMVDSSYNKEISYRTHVQTYGWQKWVNGGKNSGTEGKAKRLEAIQIELKDSLADQYDIYYRVHAQTYGWLGWAKNGEKAGTEGLAKRLEAIQIVLVEKGGAAPGSTNNFFIKKDKMKDKIKNILDVTFWKFVLVGIVNTLVGTAVMFAAYNVLHLSYWISSASNYVVGSIVSYFLNKYFTFQNKEKSWKQLVKFALNITVCYLVAYGLAKPLVSWFLHGQSKSVQDNLSMLVGMGAFVVFNYVGQRVIVFRKMIRQKVTITNPTGLHLRPAGMFCNIASRYKCKVEFMYDEDVAANAKSVLSVLGACVKSGDEIELICDGEDEKEAMDAMVSAIEDGLGEMQKRITKNLTLKILAFLIAVFLWLIVVNIDDPVDDKTFSNIPVQVTHEEVITDNNNTYQIVDNTQEVNVTVTAQRSVLDKIKAEDIQATADMKELTLRTQVPIEITIEGYAGKYEKATANPRNLQIQIDEEAKNNFPITPTTTGTVRGGYEVGALKAVPEKVTLRGPKRIINSIAKVTAEADVSGLSEDETVEAKLVLYDANNNVIDQTLLANNLGKEGVSVEVELLQVKSVPIEVDTSDVSAAEGYKFGKITVEPQEVEITGDKTTLAGVSKISIPASALQLDNLTQKTDKTIDISSYIPSGVSLTEQNANKVVVSIPVQQPGAKTFEVSTNSIVVNNIAEGLSISYGSTVDLEIQIKGPGDALNLFSPAKKVSIDLKKYTNAGTYTVPVSVELPDGCSLVNNVSVEIILEKTKQNDKTQNENSSSEGQTKEDEKKTDTIRMEQAVADFIEKYGIGLYIPRVHVTDVIEVLILTFLIYQIIVWIKNTKAWMLLRGIIVLAGFILLAAIFKMHTILFIARNSLTVMATAAIVVFQPELRRALEKLGEKQFLTSVVPFEQNREIRFSEETRENIIRACFAMGKVKTGALIVVEQAIRLTEYESTGIQMDCLVSSQVLENIFEHNTPLHDGAIIIRGDRIVSATCYLPLSDNMRISKDLGTRHRAAVGMSEVSDALIIAVSEETGAVSVAQGGKLARNINEAQLRIKLEEIQHRSSETNRIRAMWKGWREHAKKNNMDNIYVIRGRIEELYGKHSKLFDKAFQFILAMITFSMINQNTGFMKSLSSPVISLALAVVATFLPPMVIVVIAAVLVLAHTLAASIGIFAVSAMIFLIMYIFYIRLAPKMAFVVLLTPIAFVLKIPFLVPVACALIYTPVSLVPMSCGTVVFYMVEYLKKTSSASKASGSKAMLSEITTYVQKVFQNKEMWIYIVAFIIGFFVVYTIRRRELDHAWKIGIIAGAIADVVVTAMGSIALGVEISYGSLIFGNILAVIVGMILELFLFSVDYARSERLQFEDDEYYYYVKAIPKVAVTTPEKTVKKINERQETEIIDAEAVKRLSQDVTEETKAISVEPSANHKLRKETSRKTPYNNSEYRSPAQIRASQAKKHSPKRGPMPKKHDMKDVDKLLLTQSLENEFHASGKKTANKRKRMLDERKVKLMTKLALYEETHGKEDFKISSYYRKDYASLHVIYAFLSVSVGYVCLVGVLLLAGVENIMGNLSNGLIIFLFLIILAGYVGVVIVYCGIASHIYNEKHKKARKRVKRYNHNLIQLLKMYEKEKRMNHKKINKIKESIISLLWPEVCPFCQKVCRDGICKECRKKLELLKVREPRCMQCGKQIRSVEQEYCYDCMHTHHYYERGLSLWNHKNPVNQSVYQFKYHNQRRYGILYSQELVKEFQKEIERWRPDIIMPVPLHPSRKRKRGYNQAQILAEEIGKILEIPVDSKSLIRTRKTSPQKKLGHQERKKNLKHAFAVKHTFQAAKRVLLVDDIYTTGNTIDAVSNVLKQKGVENVYFLTISIGQGYMEEIKGYVEHIVYRNEDNGYTVFHLNNSDGEVTCVGNFHFIEEGELLRLTGGYTTHKMYGLQFAVEESEVCEPEDLISIERYLGSGAIKGIGAALAGKIVKKFKENTFRIIEEEPERLAEIKGISERKAREIASQVEEKKDMRQAMIYLQKFGISTTLAAKIYQHYGRNVYRTIEENPYQLADHVPGVGFKTADEIAAKIGIHTDSDFRIRSGIFYTLQQSVNDGHIYLYQEALLRETSELLGVQIQDMEQYLMDLAMEKKIVMKPSEQGMRIYTSHYYYMELNTAKMLHDLNLDFEIADANLIRRINKIEKNTELYLDDMQKTAVMEAVRHGLMILTGGPGTGKTTTINAMIHFFESEGLDIYLAAPTGRAAKRMTEATGCEAQTIHRLLEVSGNPDDETIGGFQRNAENPLEADVVIIDEMSMVDLPLMYALLNAIVPGTRVILVGDVNQLPSVGPGSVLKDIISSECFSVVKLTKIFRQAGESDIIVNAHKINRGEPVVLDNKSMDFFFLKRDDTNMIISNIITLIQKKLPKFVNAKEADIQVLTPMRKGLLGVERINKILQEYLNPPKPGKQEKEYGDHLFREGDKVMQIKNNYQLEWEISTRYGMTIDKGIGVFNGDMGIVRKINTYEETVTVEYDEKKLVKYPYNLLDELELAYAITIHKAQGSEYPAVIIPLLQGPRQLYYRNLLYTAVTRARKCVTVIGSESVFQEMIHNTNQQNRNTSLAERIRELNESMSVDLGIDLGTASVLVYVKGKGVILKEPSVVAYDRDTNAIKAIGEEARMMLGRTPGNIVAVRPLRQGVISDYTVTEKMIKYFVQKALGKRTFKKPRISICVPSGVTEVERKAVEEATYAAGAREVHLIEEPVAAAIGAGIDISKPCGNMIVDIGGGTSDIAVISLGGTVVNTSLKIAGDDFDEAIVRYMRKKHNLLIGERTAEDIKIKIGTTYPLIEDETLEVRGRNLVTGLPKTVTVTSTETEEALRETTGQIVEAVISVLERTPPELSADILDRGIMLTGGGSMLRGMEELIEEKTGINTMTADDPMKVVAIGTGEYVEFMGERKGIMSQEKDSRQYIKIRGANEHNLKNIDVDIPRDKLVVLTGLSGSGKSSLAFDTIYAEGQRRYMESLSSYARQFLGQMEKPDVESIEGLSPAISIDQKSTNRNPRSTVGTVTEIYDYFRLLYARVGIPHCPKCGREIKKQTVDQMVEQIMEMPERTKIQLLAPVVRGRKGTHAKLLDRAKKSGYVRVKIDGNMYELSEEIKLDKNIKHNIEIVVDRLVVKEGIEQRLTDSIENVLNLAEGLMTVDVIGGESVQFSESFSCPDCGISIEEIEPRSFSFNNPFGACPECFGLGYKMEFDENLMIPDKRLSISEGAITVMGWQSCTDKKSFTYAILDALSKEYDFSLDTPFEDYSKEIHDVLLHGTNGKEVKVYYKGQRGEGVYDVAFEGLIKNVERRYRETGSETMKAEYEEFMNITPCHACKGQRLKPGALAVTVGDKNIAELTGMSIEKLQAFLKELKLTNHQMLIGGQILKEINSRIQFLMDVGLNYLTLGRATGTLSGGEAQRIRLATQIGSGLVGVAYILDEPSIGLHQRDNDKLLGTLKHLRDLGNSVIVVEHDEDTMREADFIVDIGPGAGEHGGEVVATGNAEEIMQNEKSVTGAYLSGRIKIPVPETRREPTGWLKVLGAQENNLKNIDVSFPLGVMTCVTGVSGSGKSSLVNQILYKRLARDLNRARTIPGKHKGIEGLDQLDKVINIDQSPIGRTPRSNPATYTGVFDLIRDLFAATPDAKARGYKKGRFSFNVKGGRCEACSGDGIIKIEMHFLPDVYVPCEVCKGKRYNRETLEVKYKGKSIYDVLDMTVEEAMHFFENVPSIRRKMETLYDVGLSYIRLGQPSTTLSGGEAQRIKLATELSKRSTGKTIYILDEPTTGLHFADVHKLTEILHRLTADGNTVIVIEHNLDVIKTADYIIDIGPEGGDKGGTVIASGTPEEVAESPVSYTGKYIKPMLGRMNEFKLKAPYKPTGDQPQAIAELVKGFKEGNQCQTLLGVTGSGKTFTMANVIQQLQKPTLVIAHNKTLAAQLYGEFKEMFPDNAVEYFVSYYDYYQPEAYVPSSDTYIAKDSSVNEEIDKLRLSATAALIERRDVIVIASVSCIYGLGEPENFEQMMVSLRPGMEKDRDEVLRQLIDIQYDRNDMDFKRGTFRVRGDTVEIVPADRGDTAIRVEFFGDEIDRISEIDMLTGEVKNTLNHIAIFPASHYVVPKERMEKAIRNIEIELEEQVKYFKSEGKLLEAQRIAERTNFDIEMMRETGFCSGIENYSRHLAGLAPGQPPNTLMDYFPDDFIIMIDESHKTVPQIGGMYHGDQSRKRTLVEYGFRLPSALDNRPLSFDEFESKIDQVMFVSATPGKYEEEHELLRAEQVIRPTGLLDPEVEVRPVEGQIDDLIGEVNKEIANKHKILITTLTKRMAEDLTDYMRELGIRVRYLHSDIDTLERTEIVRDMRLDVFDVLVGINLLREGLDIPEITLVAILDADKEGFLRSETSLIQTIGRAARNAEGHVIMYADTITDSMRAALDETQRRREVQMAYNEEHGITPKTIQKAVRDLIAVSKKVAASEVQMEKDPESMSEKELEKLIKELEKQMKKAAADLNFEAAAELRDKLIELKKTLQEIKIMIIKHGLVVDPASGLSEHMDILVKNGKIARIAPEISEDSEEILEAGGLVVGPGLIDTHVHFRDPGFTYKEDIHTGAKASAKGGFTTVICMANTSPTVDNTDTLKDNLARASKEDIRIFQAAAISRSLKGRDEVDMLALKEAGACGFTDDGIPLLNAEFCYQAMKNAAKLNVPISLHEEDPAFIRNNGINHGKVSDALGIYGSPSIAEEALVARDCLLALRSGADVVIQHISSGVSIDLIRTYKKLGAKLHAEATPHHFSLTEDAVLEHGTLAKMNPPLRTENDRQQIIAGLADGTIDLIATDHAPHSTEEKSKPITEAPSGIIGLETSLALGITNLVKPGYLTMIQLLEKMTVNPAKLYHLPYGTIQEGADADFVIFDPDETWIPKEYASKSSNSPFTGEELTGKVKYTICGGNIVYSDIKMGFKRLEKNLIDIIKEEQAKLGFRKEEIRLYYPLISLNHFFEADDDVDEMQTRLEQFPEEVKKKLGDICVTHKKDRFCLHIPEQGSVYVHEHTAENEFIKKLVELMMNHGIKKEDILAIFQKEAKDIRVGDMHNGEFDFWVRFPEENEDEYYYCFKDEGCHMIYHRFLPEDYADFGFMGIFGRIDTFITWFDGVVWGLPLIILILVTGIFLTVRLGLLQVRYLGKALKFMVKNEEDGHGEVTSFGALCTALSATIGTGNIVGVATAISAGGPGALFWMILTAFLGMATKYSEGLLAVKYRTIDEDGHVLGGPFYYIENGMGVKFRWLAKIFAFFGAGVGLFGIGTFTQVNGISSAVRNFFDPNMAHTVALFGNDYSWATVISCLVLTVCVGMVVLGGIKRIAKVSEIVVPFMAVLYVVLAVIIMVTNITAIPAAIVTIVKSAFTGSALAGGAMGSMIVAMQKGIARGIFSNESGLGSAPIAAAAAQTKEPARQGLVSMTGTFIDTIVICTMTGLSIVITGTWNTGLEGVEITTAAFQKGLPFPPVVASFALMICLVFFAFTTILGWDYYGERCLEYLFNKNMKAVRAYRWLYIICVFIGPYMTVAAVWNIADIFNALMAIPNLIALLALSKVIVKETKAFTEKLNVEEKNQRILKGMNAENAMKKQKKDPLYKSFGYAFAGIFAVVTKERNMKIHCVAMVCVVIAGFVFHITPVEWCICLTLFGLVMALEMVNTAVEAVVDLVTEERKPLAKLAKDAAAGAVLIAAIMAAIAGMIIFIPKLLESLSIMEKLGSGLKKVLLAGIGAVAVTGEKSKELLDEMVKKGELTVEQGKALNEELKHNIKSTVKEKVNVKVKTSSPEELDELLDKMTPEQRALLKQRIDEMEKKQEEFEAAETVEDVTDESVCEDAAEKAAEEETAENEDIMSKGESKEYRTRLKEITSVLHKYGITRGITPQKLRMILEDLGPTYIKIGQIMSLHSDILPKRYCDELMCLRSEVTPMEFSEVKEVIERAYGCPWNEIFAFISDTPLGSASIAQVHRAELLSGEQVVIKVQRTGIYEIMARDIGLLRKAVKLMPPISLKGMADFDQVLDELWNVTREEMNFLTEASNMEEFARRNADVVYVRTPKLYQEYTTMHVLVMEYIEGPAIDDKEKLLAGGYDLEEIGIKLIDNYIKQVMEDGFFHADPHPGNVKIQDGKIVWIDMGMMGRLTERDKELIGKAIRGIAENDIGMIQEAVMALGEFKEKPDQSVLYEDISELMSKYGSLDMGEIDVAEVMMDLMEVMKENKIRMPHGLTMLARGLTNMEGVLADIAPQINMIEIASRHISESMWKDLDWKKELKHAGKNLYRSMHKAVEVPGLAADALHGLMKGQTRVNLDLHASNDLAQLLRRLVRNVVMGLWVMALLISSSIICTTNMSPKICGIPAIGAIGYLFAFAIVMYVLIKHILSKMARKMKTMDGNQAAAHASYAYTEVAAIYPITPSSVMPEHVDEWATEGRKNIFGQTVQVTEMQSEAGAAGAVHGSLSAGALTTTFTASQGLLLMIPNLYKVAGEQLPGVFNVSARALASHALNIFGDHSDVYACRQTGAAMLCESSVQEVMDLTPVAHCAALKGKLPFINFFDGFRTSHEIQKIETWDYEDLKDLVDMDAIDAFRNHALNPNHPCQRGSAQNPDIFFQAREACNPYYDAMPAIVQEYMDKVNEKIGTDYKLFNYYGAADAEKVIIAMGSVCDTIEETIDYLTAAGEKVGVVKVRLYRPFCAQALIDAIPDTVKYINVLDRTKEPGAQGEPLYLDVVSALKGSKFDAVPVNGGRYGLGSKDTTPAQIVAVFNNADKERFTIGINDDVTNLSLEVGAPLVTTPEGTINCKFWGLGADGTVGANKNSIKIIGDNTDMYAQAYFDYDSKKSGGVTMSHLRFGKKPIKSTYLIHKANFVACHNPSYVNKYNMVQELVDGGTFLLNCSWDMEGLEKHLPGQVKAFIADHNIKFYTIDGIKIGKEIGLGGRINTVLQSAFFKLASIIPEEEAIDLMKKAAKATYGRKGDKIVQMNYDAIDAGAKQVVEIEVPESWKSCEDEGLFTPEVKGGKDDVVAFVKNIQSKVNAQEGNTLPVSTFTDYADGSTPSGSAAYEKRGIAVDIPVWQSENCIQCNRCAYVCPHAVIRPVALTEDELAKAPEGTKAIDMIGMPGMKFTMTVSAYDCTGCGSCVNVCPGKKGEKALVMANMEENAAEQDIFDFGREIEVKPEVVAKFKPETVKGSQFKQPLLEFSGACAGCGETPYAKLITQLFGDRMYIANATGCSSIWGNSSPSTPYTINSKGQGPAWSNSLFEDNAEFGYGMLLAQKAIRKRLKEEVETVAASEQASAEVKAACQEYLDTFACGITNGDATDKLVAALDGCDCDTCKDIVKNKDFLAKKSQWIFGGDGWAYDIGFGGVDHVLASGEDINIMVFDTEVYSNTGGQSSKATKTGATAQFAAGGKETKKKDLASMAMSYGYVYVAQIAMGGDFNQTVKAIAEAEAYPGPSLIIAYAPCINHGIKKGMSKAQTEEKLAVDCGYWNNFRFNPAAEKGSKFTLDSKQPKEEDYQAFLDGEVRYNALKRANPEKAARLFAKNEAEAMERYDYLSKLTDLYKVEEMRKRKKLLFAVLTCLMIFACGAITVFAADGGKEYVPKMYSSFWALVPPIVAIGLALITKEVYSSLFVGIAIGGIFWSNFHFEKAVLHIFEDGIVGVLTDSYNMGILVFLVILGIMVCMMNNAGGSAAFGRWASIHIKTRVGAQLATIVLGILIFIDDYFNCLTVGSVMRPITDKHNVSRAKLAYLIDATAAPVCIIAPISSWAAAVTGFVKGEDGFSIFMRAIPYNYYALLTILAMVLIVVLKIDYGPMKLHEDNAVKGDIYTTPDRPYANAENEIVEEKGKVIDLVFPILILIIFCICGMLYTGGFFSGTGFVKAFSASDASVGLMLGSFFALVVTVVFYALRKVLKFRESMECVPEGFKAMVPAILILTFAWTLKAMTDSLGAAEYVANVMQSAAGGLLNFLPAIIFLVGCFLAFATGTSWGTFGILIPIVVAVFQGTNETMMIISISACMAGAVCGDHCSPISDTTIMASAGAQCNHVNHVTTQLPYAATVAVVSCITYVIAGFVQNALICLPIGMVLLVAALLLMKKRTESHSMQNNKKGVIISCMSGNYSSRYIAGQKNLLLWGNGRLQTKGEHRNSMSVKDLSAYELVKEEDLKGIKSHGMLLKHKKSGARILLIENDDDNKVFNIGFRTPPSDSTGVPHIMEHSVLCGSKNFPAKDPFVELVKGSLNTFLNAMTYPDKTVYPVASCNDKDFQNLMHVYMDAVFYPNIYQHEEIFRQEGWSYKMDSLEDDLAYNGVVYNEMKGAFSSPEGVLDRVVLNTLFPDTSYANESGGDPEVIPELTYEQFLDFHRRYYHPSNSYIYLYGNMDMEEKLNWLDQEYLSKFDYAPVDSKIRYQEPFDKVIEKEMPYSIASDESEEDNTYISYNKVIGTSLDEKLYLAFEVLDYALLSAPGAPLKRALTDAGIGKDIMGSYDNGIYQPIFSVIAKNANVEQKEAFVKVIEDTLKDIVENGMDKKALEAGINYNEFRYREADFGGYPKGLMYGLQIMDSWLYDDEKPFIHIEALDTFEFLKAQVGTGYYEELIRKYLLENTHGAIVLIKPEKGRTARMDKELQEKLQAYKESLTEEERKELVERSNALEAYQSAPDAVEDLEKIPVLSREDISKEIEPIINEEKRIADVPVVYHEIETNGIGYVDVLFDMSGVEEADLPYVGILQGVLGVIDTENYKYGELFNEINVHTGGIGTSLELYTDISKVPEKEFKATFEIKGKALYQKLPVVFRMMEEILTRSKLGDTKRIREILAMQKSRLLMKFQSSGHTTAVLRAMSYASPSSKLKDMTSGIEFYDKIAYIEEHFEEEKDVLVQKLQMLAHKLFRADNMMISYTAAKEGLNGMEELVEGLKKAMFEDPVEDTRCVLHCEMKNEGFKTASKVQYVARVGNFIDNGADYTGALQILKVILSYDYLWQNVRVKGGAYGCMSGFSRTGEGYFVSYRDPNLERTMEVYEGIADYLRNFTVSDRDMNKYIIGTMSNIDQPMTPSAKGDRSFNLYMNKVSAETIKKERLQILKAGQEDIRKLADVVEAVMKAGQVCVIGSEEKIEEAKDMFKNVTTFMKKDYKSGFVTLIGRPNVGKSTLMNQLIGQKIAITSNKPQTTRNRIQTVLTTDDGQIVFVDTPGIHKAKNKLGEYMVNVAERTLNEVDVVLWLVEPTTFIGAGEQHIISQLKKVKTPVVLVINKIDSVKKEEILPSIAAYKDVYDFAEIVPVSARNGDNTDELVKVIMKYLPYGPQFYDEDTITDQPERQIVAELIREKALHCLQEEIPHGIAVAIDSMKVRNKVMHIDATIICERDSHKGIIIGKKGSMLKKIGSTARYEIEKMLDQQVNLKLWVKVKKDWRDSEFLMKNFGYREDEMVNQITLTGMILTAAPIGEYDRRVVILTRERGKISAFARGARRPNSALMGVTSPFSFGEFTVYEGRTSYTLVSASISNYFQELRTDVEGAYYGFYFMDLAGYYAREANDETEMLKLLYQTLRALTNVHIPNELIRCIYELKTITVNGEGPQVMECIMCGDREREKVFSIRRGGVICAQCAGHISDGIRLLPSTLYTLQYIVCSPVEKLYTFVVKEDVLKELKKLTKAYLDEYLGKRFKSLEILETIVRMAEKTMDKIVSLAKARGFVYPGSEIYGGLANTWDYGNLGVELKNNVKRAWWKKFIQESPYNVGVDCAILMNPQTWIASGHLGGFSDPLMDCKQCHERFRADKVIEDYCAENNIELDGAVDAWTQEQMKNFIDEKQIPCPTCGKHDFTDIRQFNLMFKTFQGVTEDAKNTVYLRPETAQGIFVNFKNVQRTSRKKLPFGIGQIGKSFRNEITPGNFTFRTREFEQMELEFFCKPDTDLEWFDYWKKFCLNWLSSLGLKEDEVRYRDHDKEELSFYSKATTDVEFLFPFGWGELWGIADRTDYDLTQHQNVSGQDLTYFDDETKEKYIPYVIEPSLGADRMVLAFLCSAYDEEEIGTEEKPDTRTVLHFHPALAPVKIGVLPLSKKLNEGAEKVFTQLSKKYNCEYDDRGNIGKRYRRQDEIGTPFCVTYDFDSEEDGAVTVRDRDTMEQERIKIEDLDAYFEKKFEWMDKLNNIVLLIQHYLADYILIILLLGGGVIFTIRLGFIQIRGFKAGWKRTFGGLFSKKGTAGKDGMSSFQALATAIAAQVGTGNIAGAATALAIGGPGAIFWMWIAAFLGMATIFGEAIMAQKYKHVGKDGHVTGGPVYYIQAAFKGTFGKILAAVFSVLIIFALGFMGNAVQSNSIASAFHTAFGIPQIVVGIIIAVIALFVFVGGISRIAKVTETIVPIMACFYIIGSLIVIFANFKEIPYTFYSIVVGAFKPSAVSGGAVGATVKLALTKGVARGLFSNEAGMGSTPHAHAVAKVEHPVEQGFVAMIGVFIDTFVILNLTALVIITTQSIPTGLTGTALSQYAFSSVFGKFGNVFIAICMFFFAFSTIIGWYFFGQANVKYLFGKKAVKPYAVLVSLCVLLGSLAQVDLVWNMADCFNSLMVIPNILALFFLSSQMKELHDDYYHNFLKNKKVKMIFLKRELPGQPPKRQTGIEKNGKKPDETFRQKDGERYYILNLVLMSKYMVITNNPLVRSRLDDTHEVIYLELSYEELLKVVRDRIYEGHRLLTHPLSGSVKPKETPYKSVLISERKEKVDGESVRLIENAILVCQKFQDKSKYYKEEVYKDFQLVDWTLLESGLASADVWMRLEMGNIYIKDIQFADTSKIEDGILYVDKGAVKAVALEDEHIKTVTFDIAKPGESVRITPVKDVIEPRVKVEGKGGVFPGIISKVDTVGSGKTYALKGMAVVTAGRIVGFQEGIIDMTGPGADYTPFSKTLNLVMVCEPVEGIKQHEYEKAVRFAGFRVAAYIGELARELTPDETKVYETCGIKEGITQYPDLPRVAYVQMLQSQGLLHDTYVYGVDAKKTLPTILSPTEIMDGAIVSGNCVSACDKNPTYVHENNPVVHDLFEEHGKTLNFVCQIITNENVYLADKERSSDWTAKLCKMLDLDGVIVSQEGFGNPDTDLIMNCKKIEAEGIKTVIITDEYAGRDGKSQSLADADVAADAVVTGGNANEVVILPKLDKVIGTLDYVTKIAGASEDTLREDGSLEVELQVITGATNETGFNKLSARMSKIKVVHYINQFFAQIGGEEKADYPAEIRVGEVVGPGLALTQNFKDEAEIIATVICGDSYFNENLEKAKADILAMVKEQAPDVFIAGPAFNAGRYGVACGTIAAAVQEELGIPAVTGMYVENPGADMFKNDVYMISTKNSAAGMRDAVKKLAPLAVKLAKGEKIGSSAEEGYIPNGVRVNFFEKERGSKRAVKMLIKKLNDKPYVTEYPMPNFDRVEPNPAVKDLAHAKIALVTSGGIVPKGNPDHIESSSASHYGEYDITGVTDLTEETYETAHGGYDPVYANEDPDRVLPVDVLRDMEKEGVIGSLHHLFYATVGNGTSVASAKAFAAEYSQKLKADGVDAVILTSTXGTCTRCGATMVKEIERAGIPVVHICTVTPISMTVGANRIVPAVAIPHPLGNPALDKEEEKKLRRQIVEKALKALTTEVDGQTIFEMSEIYDVIILGAGPAGLAAGLYAGRSRLNVLIIEKGQDGGQIAITDDIENYPGQIVEGESGPSLIARMTKQAEKFGAKRVSDMIKEVELEGDVKILKSEKNEYRAKNVIIATGAHARPIGCKGEGQFRGKGVSYCATCDANFFEDFEVYVVGGGDSAVEEAMYLTKFARKVTIIHRRNELRAAKSIQEKAFKNPKLFFMWDTVVEKLEGEDILQAMYVKNVKTGEVTKVEADPEDGMFGLFGFIGTVPNTKIFEGVIDMDERGYIKTDADMHTNIPGVYAAGDVRVKSLRQVVTAAADGAIAAVQVERSMSDYFMIDVDKTTFEEEVLKADGYVFVDFYGDGCVPCQALMPKVHEFAETYGDKLKFTSLNTTKARRLAISQKVLGLPVMAIYKDGEKVEELVKDDCTAESIEAMIKKYIMAILEGKKAIIIGDRDGIPGPAIAECVKTAGAEIVFSSTECFVXTSAGAMDLENQKRVKEFAEEYGAENLVVVLGAAEGEAAGLAAETVTLGDPTFAGPLTGVQLGLTVYHVCEPEMKAEFDEAVYDEQVGMMEMVLDVDDIVSEMQAIRDQLMNSVIKGASYVLVHTPDMVLYNGTTQTTERVVNPDSEYLKAVPEHLRSYEEAVSYWPNQTYIGNAHPDELAAVEFPYYDKKKEGAKRYGKYGEIMPEEEFLLLVQACDMFEVVRLDKAFVAKYKDVFAQDPIISDDIIEKIHEGVELSEIEALINEDHAEPLYFEHQLVGCVKPAHDIDVNLSSHIMHENLMSKASSVLALLYAVKNAGIEKSDVEYVIDCAEEACGDMNQRGGGNFAKAAAEVAGLVNATGSDARGFCAAPTHALIEAAALVKSGAYKTVVVTAGGCTAKLGMNGKDHVKKGLPILEDCLGGFAVVVSENDGVNPEIDLDMLGRHSVGTGSAPQNVIGSLVADPLDRVGMKITDIDKFSPEMQNPDITKPAGAGDVPLANYKMIGALAVKRGELERKELVNFTKEHGLTGWAPTQGHIPSGVPYIGFAREDILSGKIKNAMIIGKGSLFLGRMTNLFDGVSFVIHGNTAAEEKAASGVSEEEVKGLIAKAMKEFAATLMAEMADKIERIIADTFLQMAEGLETGNFGKKPKIALTGMGSEHGEENAMEAAKMAAKDGIEVYYIGTLEAEGVTTVKVANDEEGHKKMEELLASQKIDGAVTMHFPFPIGVSTVGRVVTPAKGKEMFIANTTGTSSADRIEGMIKNTIYGMITAKACGLEHPTVGILNVDGARQTEIALKELKKNGYDITFAESARADGGCVMRGNDVLQGTPDIMVCDSLTGNIMVKMLSSYTTGGSFEASGYGYGPGIGEDYEQLVMIVSRASGAPVIAGAIRYAAQLVRSKVFDIAKKEFEMAEKAGLKEILEVRKQSSKPAASDENIKEPPKEVVTSQIAGIEVMDLEDAVKVLWKQNIYAESGMGCTGPIIRVSDANLSKAEEELKKAGYMNMQDFHPAKRRMKNLIKKWNNISLIKRIICGLIIGLILGLVVPQASVISILGTMFVGALKGIAPLLVFFLVMSALCHMKTGQKTNLKFIIVLYMVGNLVSAFVAVIACRLFPVTLTFTDSASSTDITPPSGIAEVLTNLLTNLVKNPVDSLVNANYIGILFWAVIFGITLKHANQGTKDALENISDATATAVQWIISCAPFGIMGLIFSTISEQGLDALLSYGKLILVLVGSMAVVIFIINPIIVFIFTKQNPFPLVFTCLKGSFITAFFTRSSAANIPVNMELCKKLGLDEDTYSISIPLGATINMAGAAITISVMALSTAHTLGIHVDFLTSIILCVLAALSAAGASGVAGGSLLLIPMACSLFGVPNDVAMQAVGVGFIIGVIQDSCETGLNSSSDVLYTAIADIREKRLHNQKMQLNNDGLMWALVKEKPEEGLWMKRVPIPEVGSNDVKIKIHKTAICGTDVHIYQWNDWAQHTIPIGLTAGHEYVGEIVEKGEGVRGFEIGDLVSGEGHITCGKCRNCLEGHKENCKDAKGVGVNRNGAFAEYLVIPSSNVWPCNPNIPEEMYAIFDPFGNATHTALSFDSLGEDVLVAGAGPIGCMAAAIVKFAGARNVVVTDMNPYRLELAAKLGATRTVNLKEENLKDVMKQIGMTEGFDVGLEMSGSQAALDDMIHNMKHGGHIALLGLQRTDAKVDLETVIFNGLHLKGIYGRKVWDTWYKMSTMLQAGLDISDIITHHFDIKDYQKGFEAMISGNSGKVILDWAHVNDMARKNDILNIYTKEVEGIKEAGLFKGEAPFVSPQGARVKMEDGRELLCMCANNYLGLGDNPRLIEAAKRTYDEKGYGVASVRFICGTQDIHKKLEKKISGFLGTDDTILYSSCFDANGGLFETILTAEDAVISDELNHASIIDGVRLCKAKRFRYKNNDMEDLEAKLKEADEAGARIKLIATDGVFSMDGIICNLKGVCDLADKYNALVMVDDSHAVGFVGKTGRGTAEYCGVEGRVDIITGTLGKALGGASGGYTSGRKEIIDLLRQRSRPYLFSNSLAPAIAGASLELFDMLEESTELRDHLEEVTAYYRKKLVDNGFDIIPGTHPCVPVMLYDEKTAAEFAKRMMEKGVYVVAFSYPVVPKGKARIRTQVCASHTKEDIDFIVKCFIEVREEMGLNKMERRNAWKIYTADQLKELDQINSRYKVCLDEGKTERECVRLTVKEIEKKGYRDLKDIKGSLKAGDKVYAVCMGKSIAMFQIGKEPLENGMNILGAHIDSPRIDVKQNPLYENEDLAYLDTHYYGGIKKYQWVTLPLALHGVIVKTDGTVQKVNIGEKEDDPVFVVTDLLIHLAGKQMEKKASAVIEGEKLDLLIGSRPLEKEEGLDEDEKDAVKANVMKILTDYYNMEEEDFLSAELEIVPAGKARDCGLDRSMILAYGQDDRVCAFTSLFAMLDVEDVERTSCCILVDKEEIGSVGATGMHSRFFENVVAELVALTEGESDLKVRRALQNSKMLSSDVSAAYDPMYAEAFEKRSAAFFGRGLVFNKFTGARGKSGSNDANAEYLAEVRRAMNAEDVSYQFAELGKVDLGGGGTIAYIMANYGMEVIDSGVAVLSMHAPWEVTSKADVYEAYRGYKSFLRNIMAKWVYMFTEGNATMRNLLGGKGANLAEMTNLGLPVPQGFTVTTEACTQYYEDGRQINDEIMGQIMEAIDKMEGITGKKFGDKKNPLLVSVRSGARASMPGMMDTILNLGLNEEVVETLAEASGNPRWAWDCYRRFIQMFSDVVMEVGKKYFEELIDKMKADRGVKQDVELTAEDLKELANQFKAEYKEKIGSDFPSDPKEQLMEAIKAVFRSWDNPRANVYRRDNDIPYSWGTAVNVQMMAFGNMGDDCGTGVAFTRDPATGENGLFGEFLTNAQGEDVVAGVRTPMHISEMEEKFPEAFVQFKQVCETLEKHYRDMQDMEFTVEHGKLYMLQTRNGKRTAKAALKIACDLVDEGMRTEEEAVAMIDPRNLDSLLHPQFDAAALKAATPLAKALGASPGAACGKIVFTADDAVEWAARGEKVVLVRLETSPEDITGMKSAQGILTVRGGMTSHAAVVARGMGTCCVSGCGDIAMDEANKKFTLAGKEYHEGDCISLDGSTGNIYDGIIPTVDATIAGEFGRIMGWADKYRTMKVRTNADTPHDAVKARELGAEGIGLCRTEHMFFEGNRIDAFREMICSETEEEREAALAKILPEQQGDFEKLYEALEGNPVTIRFLDPPLHEFVPTEEEDIKKLADAQGKTVEQIKTIIDSLHEFNPMMGHRGCRLAVTYPEIAKMQTSAVIRAAINVKKAHPDWNVKPEIMIPLVGDIKELKYVKKFVVETADAEIAAANSDLEYEVGTMIEIPRAALTADQIASEADFFCFGTNDLTQMTYGFSRDDAGKFLEAYYDAKIFENDPFAKLDQTGVGKLMEMAIELGKPVNPSLHVGICGEHGGDPSSVEFCNKIGLDYVSCSPFRVPIARLAAAQAAINQKMVVKKKVTIAFVIIGILAISTMIIFSTYKSSEAYRKAKAKTQWECSVVCAEKSTPDSYVITYSDAKILSNTGVLTFQNRNDFDITVHLLCEGKQELVSDSIPAGGCYSFQNVTDKEYTVGIHAEVDENTDIKAFVYDGKDTEPYTRMFIIIYDFSMAVLMFLFGIYFYKSKGKAARFLSGYNMKSEEERKKYDENAMCKAYGKRMMVMSLPFIVGIIIDIQYQGTGCLIAWMIWLIMFISLLIDRHKRERMSYIFSNILPYQTDEVDLFSDDDMDGDIQPIPQKDYERLIEFLQNYNPPAILPIQIAYYAGLRIDEACGLAWHDVNLEEQCLTIRRSIRYDGSRHKNIIGPTKRKKVRIVDFGDTLAEILRTARKEQLKNRMQYGELYHKNYYREVKDKNRVYYEFYHLDGTKNVPEDYKEISFVCLRPDGSLELPSSLGIVCRKIAQKLDGFEGFHFHQLRHTYTSNLLANGAEPKDVQELLGHSDVSTTMNVYAHSTRKAKRESARLLDKVAGNDMSEKILIIDDEQDIADLLEVYLKNENYVVYKFYCATDAMSCIESGDIDLAILDIMLPDMNGFSLCQLIRKKYTYPIIMLTAKIEETDKITGLTLGADDYVTKPFRPLEVVARVKAQLRRYKKYSPGIITEKIPSELSYNKLCLNVQTHECLLDGEPVSLTPTEFSILHVLLSSAGNVVSIEELFHAVWKDEYYSKNSSTITVHIRHLREKLNDTSDTPQYIKTIWGVGYKIMKRKSNCLATILFLIYLALLVWIILFKLQFSISDLDKVRSINLIPFHYDKEVGAAFHLTEVLENFLIFVPMGIYLQMLLPRTKLYVKFMLIAGTSFLLETMQYILAVGRSDITDVLTNTAGGLLGLAVYSMAARLIGNRIKANRLFSILAGIVSVVVIGLLGFLLFANRMSNKEMTTEKRLKVRLYLSLLVYTVVGYGLTLILDYIFSKFDNGIFAWLYWRLDLLFILYLMLGFICIFNYYWKKPWGYLDEVIDATQTVYEQNNHTVSLSEPLKELEEQLNQIKMSVLLSKQAAKQAEEKKNEIIMYLAHDIRTPLTTVIGYLSLLHEAPDMPEQQKEKYVKVALNKAERLEKLINELFEITKYNAHTVIIKKEIVDLHCLIAQVIDEIYPTLSANGNTAVFTAEDNLSVNADPEKLARVFSNLLRNAASYSYPQTEITISAKRLEHDIQITFENRGKTIPQEQLNSIFEKFNRLDDARLSNTGGAGLGLSIAEEIIHLHGGKITASSQNETIDFVITLPLSAMELKIEHLSKQFKDKTAVNDVNLTLTPGVWGLLGANGAGKTTLMRMIADIMTPTNGAVYYDGKDIRELGEVYRSKFGFLTQDFGYHRDFTVKDYLEYMAALKDIPTRATTQKINHLLDILSLSDVKKKKISNLSGGMKRRVGIAQAMLNDPEILVMDEPTAGLDPGERVRLRNFISEFSHDRIVLISTHIVSDIEYISTRNAIMKAGEIVDVGTTAELVKRIEGKVWNCIIPTSKLPECEMRLRIINQRGEDHNQVSIRYLSEHSEIDGSVTTEPRLEDLYLWLFPQTDLEKEDRMRLFRLELKRILKSRRTLILLSIALLLSVAMAYLPISFEGINRPNEDGTVTELDGLAAIKYEQDLYKTSAGEVTPDRIKSALETYQSCVREYGPVEEEGFPLAVFVEKIVPFRHLLMGLSEAFADPVTGIGADLMDIDPNDIDGAYYEKCAEHLQDVMRNEQRENETAQQKALEKYSELDTPFYLHSGISKDAFDYIEFYILFLAILCVAIAASTFAGEYQTGADSILRTTKYGHKQLAITKILAAFTLFVVTFLVGITVHILILDAAFGTDCLKTSFQMRYSIINLPNINLGQLQIILAAAGLLSVLATVSCTLFLSAKCKDTLTVLLISIVVLLMPLFAYVAMGATWLSTILPSAGIGMQNNFLSQLADFNYLNIGGMSFWTPHVILISAGIELFVFTFLAIHSYCRHQVAMRTIFAEYNPKRNSIDVYTSVGYMLRIDCWEAEKNLKTTPGSDCALNALAIDEPLEYAKLYLDGNLQMWVDAEDSLDIFMFTNSDKGKYKGAGHPVDVRFAPTVAKRRPRKLYKTVMNIGFWLCGVLVIPFVIIGVLFAIFKEKAAKFVSGFNSLPKEEQALYDKAHISRDIKNQCFTWAGIMLVGAVLSYFLTPYMAIPAFIIWLVLFFKEVHFDTHKAFEKYLLKMISVKKQRIAAIMVLSSIMLILLLSLNFRIWSGYYAEGDLESIVIQQMECLEKSNSENDISESICLHFYECICFGGIEIMVLWVYDGFKDLGQGEFSFRPGVTLCSLSVRMDDMYVLNANHISKSYKTAGETMRILQNVNLQVMKGEMVAIMGPSGSGKTTLLHVLTGVDTPDDGEIVIGGETFSQLTEEEKAFFRRKHMGMIFQDFQLLESLTVKENILLPLILERKEADIQQERFSRIADVLGIEKLADKGITEISGGQKQRVAIGRALINEPDIIFGDEPTGSLDRKTTGDVMRCMKQMNQRSGISFLLVTHDAYTASFCDRVLFLQDGNLAKEVKKENTADNFREDIWKTLCGLGGGKDDLFMTFFDISRKMLKAGFYKYRLYFLCNLSATALFCCFAVISTNRTFMNASIVNSSISNNIYLPFFLSAVFLVFFLPVSCQAFLASRKQEYGVMFSLGMSRKEAFRNLLFENVIISVLALAIALAAGTVLSFLFFSVIIYAIDVHGVQWQFCPEAYKLTAVLYTVVVAVAFILNAGRLMLDKIGTLLKAQYRAEKTGKIGTFLCRLAPNYMRFHLVEWSFVRRHKKEWGCRYVLASLIIAVSVMLTGVCVTLYPAFLQDAKSYSPYDMVYSEIYGMNQVSVQDVLHILEKNGVTVELVIQLPYIRDDVFNYLPVTEINRDFGCDYQIQEGEFLNLFQYNLEDGYEHNIQPVSTVTISGDRKLQSVGTDVKILFNQNPTFADKTLIINDSDFEKLSADITGSVGIANLFQFQNWEDSYAGVCEVKEYLQESNQLNEDEQTYYELSSKVEKYQDAKKSGQFLLFLMAFVIGLMIMAEFLLIHSRIQAEKEENSRVVCSLRMLGMIDKEMVKCLCYKNFLRFIPPSVVGTILSFLPSYYLNESYGMGTNGILAGIVFGVILTVGIFVVIRRYSEKEEKLYESGFIIQGRGFFERIFMLKELKKNKMSVVATGILFGVMGVLIIPMIAVIVKISNALSQKHPRIYKYSMIAFIGMLLAISLFCVVIKHQMSFLVIVACLAITLCDTIKNRMEISDLIKSARSEKGLTQQQLADVVFVTRQTISKWELGKSVPDQASLILLYQYLDIKDNEKKQLSKLIFNKQNIILILIAILFSPMVIGVRFICCKIDKIENRKIKAVIKVIGFVVFSSYLVSLKENVAYLLIGIFSLVYLLYQFYLSGLETKMKLADLATGSDWIVWIVFAIFAVLSIILLSGHGSWFISGYNTASREEKEKYDEKKLCRTMGIGMSIIAILALTMSLFENILPAFFIYIALGIILVDVVVIIILGNTLCRKMPGILVVEDDENLNRGITFSLKKSGYEVFSAESVKKAKRIASDHNVDVTICDVNLPDGNGLEFVRWMRCNYNTYIICLTALDQEMDQVMGYEAGADDYITKPFSLSVLLLKIEAHFRRRQEKTEAGKMISGDIVFIAGEMKVLIKSREISLTKTELKMLTFFLQNPKQILSKTQILENVFDLEGDFVDENTIAVNIRRLREKIEDNPAAPVYIKNIRGLGYIWNQEVRQMTKRYRKKIAVVLSLVLPVILLFAILNCFTTYVFYEDYKYKMNLMTEIAAKEEFSGLDAVSELLKDKDIETNEQGRRLLEQYGYWGNKGNAFYMQFRHQVMVTGAVSTVICVLLLTFLLYWKKKEDACHQKILDQLEEILIRFRENKFDALLKTENPAELEKLNDQLEAIGHHIQLLKEEAREEKESTKEMVSDISHQLKTPVAALDTCFSVLMQNDLSATEQEEFRIRCRSALDGLETLLQSLLEISKMETGLIQINKKKLPLMDTVISAVNCTYPKADEKEIEFVFDYAKELETCMVMQDKRWLGEAVINVLDNAIKYSPDGSKIFIRLQKRNDLVRMEIEDQGIGIPQNEYHKIFQRFYRGSSRKVMEKSGTGIGLFLSREIIEKHGGTIMVTSGKKKKGSTFVIQLPYVGMSVILETKQLCKFYGAGENQVKAVNQVDIQIEQGEFVAIVGKSGSGKSTLLHMLGGLDTPTKGSVTLAGKDLYRMKEDALAVFRRRKIGFVFQAFNLVSSVNVWENIVLPLGLDGRKVDEAYVNDIIATLGIENRIYNLPNQLSGGQQQRVAIARALVNRPEIIFADEPTGNLDSKTSDEVIALLKMTAKKYGQTIVMITHDDEIAQVADRILVIEDGQVVDFRMKTISRIAYSNDKRNRTRSILIMMAICLTTMLLVIISTVGNGVIHLQKSQAAGSYGSNYGLFVSADGSQLKEVNRRAEIDATGTMCTEGIIKGNEKGGFVCMDETARKMLPYNKEYELKEGKYPEKMQEIAAGRAFFRAMGYGDVKIGDTVTLDYRAGMQSEYKPEEFVVSGILYDRDEYTIEASYVAFGSQEFYDEHVAENDRQYNIYFTLNDSANVSMNNIDSVIKQIAAACGIEEKNVIVNDLYLQWVLQPSYETIAVCGGLILAIVLFSVVVIYNIFQVGIANKIQEYGKIKALGATKKQMKQLIFGEGIFLTFFSIPVGLLFGFLIAKCGFNWLVEQGNLVSTGTGSMGVQNQQVPLFSLPVMLLCIFVSFLTVALALRKPMKIVSRISPIEATRYLENAETQKKGKRNGRKNVTVFSMAMANITGNPKRTIGTILTLGLSCALFVIISNYVGNIDTEHEARLSVNHGQFELQLDYSSEYDERYPENNLDTILTDNPLNDSLIEEIKSIPGVTDVMTRECVSVNLNGTRFPAAVVSKKDFDFMRQDGDIGSMDYEVLPKDIHWHMIGHMQRNKVKYIIDKVDLIHSVDSVRLAETIDKEAEKHGVIANILIEVNVAKEESKFGLMPEEVPEFVEKIAGFPHIRVKGLMTIAPFVENPEENRPIFAHLRKLSVDIAKKNIDNITMSILSMGMTNDYQVAIEEGATMVRVGTGIFGARDYTHQVMGVLDKFLSIMKLDDGDDEYDEDEFFDDDEYDDDYEEKPKRSLFHKNTKDNDKDFDEDDEDDYTAPVKSKSAFSNNKVTPMRQPSRRSSVNMEVCVIKPTSVEDSREITETLLSGRTVILNLEGLDLEIAQRIIDFTSGATFAISGNLQKISNYIFLVTPTNVDISGDLQDLLNTSLDSSSMRSRFMNKEESMLQKRLVELSRLAYNRGIVIFSDFLNLNELNILHTTPKDMFLSQYKTYGGYDLSERQMAVFLPDALYYDYEYPIQIIEVTPSSKRFAENLTHRDYLGALMNLGIERSKVGDIIVEDQKGLIFVKEELAEYIADNLTVVRHTNVNTSIGKGVKVDYEPRFEELKGTVSSIRLDSVLALAYPLSRSKITAQIEAGKVFVNGKLITSNGYRLKDNDIISVRKMGRIAYDGILSETKKGRYLISVRKYIMKTNTKRITHYIMALVSIVVLVLLDQITKHLVVLHLKDRSAYVLIKDVFQLEYLENRGAAFGVLQNQRIFFYISVLLITIAVIWFYHKVPIEHKYLPLRICAVLILSGAFGNCIDRIRLNYVVDFLYFKLINFPIFNVADIYVTVAAFLLVILILIYYKEDDLERIFHMKEFSIDRNTEGQRIDRYLSDELEDRSRSYIQKIMKEGYVKVNQKPVKSNYRLSFGDSVEVTLPEAKEPDIVPENIPLDILYEDQDIIMINKPKQMVVHPAPGHYSGTLVNALMYHCGDELSGINGCMRPGIVHRIDMDTTGSLVVCKNDKAHQSLSEQLKVHSIRRIYVAIVHGNIKEDSGTVNAPIGRHPTDRKKMSTHCKNGRDAVTHYKVLERFGDYTYIQCELETGRTHQIRVHMASIGHPLVGDEVYGPKKCPFKGLQGQTLHARTLGIIHPTTGKYLEVNAPLPEYFIELLDRLRNIYNMAKTNTIITIGREYGSAGRQIGYKVAEDLGIKLYDREMLERAAKESGICEELFETHDEKPTNSFLYSLVMDSYSFGYPSSSYTDMPINHKIFLAQFDTIRKIASEGPCILVGRCADYALEEFDNVLSVFIHADMDARIRRIARIYDLTDAKAKDLIKKTDKRRSSYYNYYSNKKWGAAESYNICLDSSLLGIDGTAKAIEQLVELKENITDKKLMIDSSTNLANTSSNKPHNYHEQSQIDQTLRLREVLKTLPPFVKDYFRAMEPKSSARTRINYAYDIRVFFHFLMENNPVYKNYTIDRFTPQDLENLEPVDLEEYLEYLKVYKRDEDGELITNGEKGLARKMSALRSFYGYYFKHRIIQKNPTLLVDMPKLHDKAIIRLDTDEVALLLDFVESAGEHLTGQALNYYKKTRDRDIAILTLLLGTGIRVSECVGLDIKDVDFKNNGIMVTRKGGNQMVVYFGDEVAEALKNYMAGDREAATPLPGHEQALFLSTQRKRMGVQAVENMVKKYARQVTPNKKITPHKLRSTYGTSLYKETGDIYLVADVLGHKDVNTTKKHYAAIDDNRRRKAASAVKLREIMSTRRIYLEGLKETDENADKKIYAGNNYSGYNRVSIRRKRSLYVKKLFAGFFSIIMILGLSAFYGSGLVSAHDNAKDNSIRYKYYKSIQIHCGDTLWNIAEENMSDDYESVNDYITEVKKINKLSSDQIQDSQYLMVPYYSYNKMAQGKISAKQEEILEYIKSQILERGFPPSVRDICEAVHLKSTSSVHSHLETLEKNGYIHRDPTKPRAIEILDDSFNFNRREMVNVPVIGHVAAGEPLLAEQNIENYFPIPMEYMPNKQTFMLKVHGESMINAGILDGDLVLVEQSSVADNGDIVVALLDDSATVKRFYKEEGIFRLQPENDALEPIIVRDLQIMGKVIGVFRFFAMDQAKEMAKIAFEALEDKKGEDVCAIDISAVSVLADYFVIANGNSDSQVRALVENVEEKMHKAGYAAKETEGHRSGAWVLIDFGDVIVHIFDRENRQFYNLERIWNDGKRIDDVNEFMDEKILKIQHTLKKELDENRYHHTLGVMYTSASMAMRYDVDVQKALYAGLLHDCAKCIPSDKKIRLCEKYGLPVSSVEKENPSLLHARLGAYLAHEKYGVKDEEIICAIESHTTGRPGMSMLEKIVYIADYIEPGRRELPNMADVRQLAFRDIDECLYRILKDSLVYLDSKNITVDPMTQRTYDYYKKEMGKEDMKIGIMGGTFDPIHNGHLMLGHAAYETFSLDQIWFMPNGNPPHKKSETIKSTAEDRMKMTSLAIAPFPEFVLQPYEALREEVSCSYQTMEYFKEMYPEDEFYFIIGADSLMAIETWVHPERIFPTCTILATYRDEIKTKEEMDQQIHHLSEKYGAQVLLMETPLMPVSSHELRASLQAGESVSAYVPDAVCGYINEHQLYRMTTKQRAYLKGLAMNLDPIFQIGKNSMTPEVTKAIQEALDARELIKISVLKNCADDPRALAEVIAERTRSQVVQVIGKKIVLYKEGKDKHKKIELPKMFADRARIFIRAGKGGDGHVSFRREKYVANGGPDGGDGGRGGDVIFEVDEGLNTLQDYRHKRKFTAKDGEQGGKRRCHGADGEDIVLKVPEGTVIKESESGKVIADMFGDNRRQIILKGGKGGLGNQHFATATMQVPKYAQPGQPAKELYVDLELKVIADVGLVGFPNVGKSTFLSRVTNAQPKIANYHFTTLNPNLGVVDLPDANGFVIADIPGLIEGASEGVGLGHQFLRHIERTKLMIHVVDAAGTEGRDPVDDIYKINNELKAYNADIANRPQVIAANKIDAIFTDDDPVQRLKDEFEPQGVKVFPISGVTGQGIKELLYYVSNELQHLEQDTIVFEQEYFPEEEIPMNDLPYTVEKEDDMYVVEGPKIEKMLGYTNLDSERGFAFFQKFLKDSGILEQLEEAGIQEGDTVRMYGLQFDYYKMMKLNLQFFAHKKGVGSTKNGRDSESKRLGAKRADGQFVKAGNILYRQRGTKIHPGINVGRGGDDTLFALVDGVVRFERKGKDKKQVSIYPVAMIHVTIFQNKYKECVGFQTEGHAEYADPGQDIVCAAASILVINTINAIEEFTEDDASLISEDEMGMISYHLNHPSKDAQLLLNTMILGLEQMVDDDNYAEYIDLTFEEVMYAIIATGGKQYKVAEGDIIKVEKLGVEAGETFTFDQVLAVSDNGLKVGNPTVAGATVEASVVENGKAKKVIVYKYKRKTGYHKKNGHRQQYTAVKIEKINAMIIDFHTHMFPDKIAGRTLDYLSGIFGASPFADGTYTGLCNSMGKGAVDISIALPAVTKVSQVASINRFASAYTEGPVISFGGIHPECENYKEILKEIKNLGLKGIKLHPDYQDMYFDNIRYERIIDAASELGLITVVHAGVDPKCPEDVHCTPKMARKVLDDVKPEKLVLAHMGGNEMWDDVERYLVGQNVYFDTGVILNTMLQEQFLRIVHMHGADRILFGTDSPWADQKNFVALLEHMPLTEEEKAAIFSENAKKLLGIMNIMFFLKPKSELAYIYDYHTLRQAMEIMEYHKYSCVPILNKEGKYVGSITEGDVLWALKKLDIFNIKEAEDISIMKIKRRVDYQCVTAESDMEDLIGRAMEQNFVPVIDDQEHFIGIITRRDIIGYCYDRLKECGTQDDHMKKVVKFGGSSLASAEQFKKVGNIIRKEESRRYVIPSAPGKRTPDDTKVTDMLYSCYGQAILGEDAERDFEEQLEAIKERYNSIIRGLNLDLSLDEEFKTIRTNFSKKIGRDYAASRGEYLNGIIMAAYLGYEFIDAAEVIVFDENGDFDGDETHKILSERLENTERAVIPGFYGAKPDGSIQTFSRGGSDITGSIVAKAVHADMYENWTDVSGFLIADPRIIKNPKPIDVITYRELRELSYMGATVLHEDAIFPVRKEGIPINIRNTNAPEDKGTLIVEDTCRKPRFTITGIAGKKDFASITIEKAMMNSEVGFCRKVLEVFENNNISIEHMPSGIDTMTIFVHRDEFEEKEQDVIAGIHRAVEPDFLELESDLALIAVVGRGMRATRGTSGRIFAALAHANVNVKMIDQGSSELNIIIGVRSHDFDAAINAIYDIFVKTMIMSKKEVKTNAMRMLDRAKVSYTYEEYECDDFTDGIQTADKLGYDHKLVYKTLVTTGKTGNHYVFVIPIEAEIDFKKAAKVVGEKSLEMLHLKDLTKVTGYVRGGCTAIGMKKQFPTVIQEDAKELEYMHVSGGKLGMQIRLAPLDLQKVAKAEFADVIRPMLKIRIKFRKYGVMRFIGHLDVMRYFQKAIRRAEIPIAFTTGYSPHMIMSFAQPLGVGVTSDGEYFDIEITEPISSEKAVAQLNAVMVEGVEVISFREISSDKKASGMTIVAAADYKVTFPETFQHAEEIRTLPESWKEKVDAFMAQPEIVVLKKTKRSEKEVDIKPMIYKMTALDDGIYLYLATGSEQNLKPDLVAEAFLKFAGEDPEEIPVHIHRIDVYAKNPEAAEGQTEFITLEGLGKDILMRKLALNDEILLKIEKPARYIGNEVNSVMKDPAKVSIRFAMCFPDVYEIGMSHLGIQILYDMFNKREDVWCERVYSPWTDLDQIMRERKIPLFALESQDPVKEFDFLGITLQYEMCYTNILQVLDLSGIPLAAEERTDEDPIVIGGGPCTYNPEPLAEFFDLFYMGEGETVYDELLDAYKQNKKRGGTRKEFLEMAAEIEGIYVPAFYDVTYKEDGTIESFRPNNPHAKEKIKKQVVMDMSSATYPEKPVVPFIKATQDRVVLEIQRGCIRGCRFCQAGMLYRPTREKDVEVLKEYAYKMLKNTGHEEISLSSLSSSDYSHLRELVMFLIENFKSQGINISLPSLRIDAFSLDVMGQVQDIRKSSLTFAPEAGSQRMRNVINKGLTEDDILGGAGQAFDGGWNKVKLYFMLGLPTETEEDMRAIPELADRIARRYYEIPKDQRNGKCQITTSTSFFIPKPFTPFQWARMYTNEEYISRAAIVKHAFNEQLNRKSLRYNWHDAEVTVLEGVFARGDRKTAAVIKEAYRLGCLYDSWSDQFDNEKWMQAFENTGIDIAFYNHRERPLDEVFPWDFIDIGVTKEFLKREWNQAMNAEVTPNCRMKCSGCGVAKWKGGVCVENKNMKKMSLQWRLTCITTLCIAIICGCLTMFVYKNGVYYMDSLQKAVDAQGDDSGGGSEEIYISIPEDKWDEFSNDFSVQVYNNKEDYKRNSLIVSALLALLGGVAAYFISGHALKPIREFSDKIEEVQAQNLADSGIEECKIKELNQLSVSYNKMLERLSDAFEIQRQFTASAAHELRTPLSLMQVQLDLYHSTQHPGSDADTVQMIKMLTEQNDRLGKMVKTLLDMSELQTVGRDEKIILNDLVDEVLEDLEPLAQEKNIKLIGKYKNITMIGSDILIYRLVYNLVENAIKYNHSDGQVTVNAYKKQKHIYLSVEDTGSGIPKELRERVFEPFFRVDKSRSRELGGVGLGLALVHEIVRVHDGSISIKSNPAGGTIFEVIFDQKSKEMILRLLIVEDEKQICDAVAKSLYDAGYEVDTCYDGEEALEYILTENYDLIVLDLNLPGMDGMEILKELRQSNEETKVLILSARGQIADKVEGLDAGANDYMEKPFHLQELEARIRSLTRRKFVQKDVCLESGDIMFDTIKREAYAKETKISLTRKEKGILEYLLLNLGRPVSQEELMEHVWDASVDSFSGAIRVHMSSLRRKLKAVLGYDAIMNKVGEGYKIREESDMKCKKIFQFVIFITGTAMIGYGVIRGEAAAVFGKAIKLCLECVGIGMDKKTKLLSKKVARIRGWIQAIATLLTNIHIPNLLKGKIYQGKIKTVCVPGLNCYSCPAATGACPIGAFQAVIGSSRFKFSYYITGFFILLGMILGRFICGFLCPFGWFQDLLHKIPGKKFSTARLKPLRYLKYIILIVFVILLPLFVTNSIGMGDPFFCKYICPQGVLEGAIPLSLGNTAIRSALGTLFSFKCLILITVVVLSILFYRPFCKWICPLGAIYSLFNKISFLNIKVEGSKCVGCNQCSKACKMDIDVCKTPNHPECIRCGACIKACPKDAIQYQFLGKTCPKKEQMKTKRTFFSILTLCIALLFTACSGKEAASTEKSQDTKTESSSVSTDDSNSKLDNLYQQENQIFADHEDVWNKAFGMMSKSAADQNGNYADYLADTVESNKDSFTDDELKTLTADIETIRKIEEQIAEIEKKNTGSDNTDQKNSSNDASPFKNFSGQDYDGNSVDESLFSKNAVTVINFWFTGCKPCVAELSKLNELNDAIKSMGGEVVGINTETFDGNKTAIKEAKTLLKSQGAKYRNLSIDSSSDAGKYASDIMAFPTTILVDRNGNIVGDPMLGGIDNQDNYDTLMKQIQSVIDADSTKMAKQHDKQFKLDAVQYYQDHKDLGVRGCAENLDIGYSTLTKWLKDFRESGDIPVRGSGNYASDTQKEIARLRRELRDAQDALDVLKKAINILGKMTEVIYLEVSEKTETAQKVGRRVSVSGMLKFLGVSRSGYLAWLHHVPSDTEKRRKAVKAKIQDIYDDSKQNCGAPKITVELRKTGEVISERTVGTYMRQMGIRAQWSKPWTITTKDSDFSTELQNILDEQFNPDRPNAVWCSDITYIWTIDGFVYLTSVMDLFSRKIMVWTLSETLEVSCVIDTINKAKARRNIDQPLIIHSERGSQYVAKEYKKATENMQRSYSKKAFSWDNACIESFHSIIKREWLNRFKIRDYKQAYQLIFEYLEAFYNTKRIHSHCNYMSPNEFERVYERTHTEAELLAGMLLSNSNVEKLPYIGLILQCTHKCVQQYYFIAFSNACEKISSSRSLLKSFFILKHSAWYFFDRLALLFIFALFGKSLENCPNEILQYLAISRIDSYIANNSLSVKTDVSLFFRYIRYRCNPFSNSRQSSSLIFSLLWRIHSKILSSSLFPTRSNISCHCLHDSFSTSSMNIEELKQAIEEATIGLYDKDELLNLIQEASKELENLEAERDKVKASLESMEEQYELAGDDKKRIKEIADEYGFEYDIKVRHGELMMLCKEYEDGIKSLQQELGDYRNFNKRRCFENIRFLLKEKTDVKIGQIEKEAGVSLGYMSRMEKPGNSSEPSAEFIVTAAKMLGVSLDLLALTDMAVMNPTEKYLATLMEKLNKDTIADKLEWHRDSADSLNRMETDMNGNIEHPLFSMETFYEETEMEYPEEVTRIVFTSHTFDCHTYINGECFRLNMKGDSTLYLMDISKSVHRVNDPNAYAKEIWINTPGVGTQFLTSNRDVSQLSELVEILFDTVKRGSKHPKIKKNIKSVLDAFIDHDDLGEDDNLPFYMTKTDYPIYAEDGSLFCKKVVDEYGEEILEGPKGKRITFRNLSAQVFNPATANKNRGKIKKARMLECMNVAHNHIGKPEEISKEKFNMKTLKSKPRGMELTTERAMENLQTKSEKQYYIPMEVNETSKEFIIANGYNLSTDAVCTKIGHRTVRAIMIPATKEQYLEYMRPLWREDKQGQRASKQEDESKMQPVSLDQLYESTEYEVSDGVDLEANLIKQEMIAELHAALDELEEMDRTIMTMFGDGATEKQIAEVVHLSQKGVNKRKKKVMVQLKTRLKDFEMTIKCRTGTEKCDSNQLDTELINTLVVISVVSKRLAEKLNTLSKQEKAGEGGNTNGKGQMGKVSELSQLIEELNRCGNTFIGISEDLKNLFSGSEEAEETEPKTKVAKETPAKAPKKEKTLSLEDVRAVMADKSRKGYTAEVKALLTKRGINKLSDVDAKDYAALLAEVEVIGDAGMPDKHAVLSASSSHRWLACPPSALLCAKEKDKPSEFAMQGTDAHTLCEYKLKTALGQQSKDPVENLTFFDEEMADCTDMYAQYVMEQLSVAKERCSDPIVFIEQHLDFSQWVPDGFGTGDCIIVADETLTVIDFKYGVEILVDAENNPQMMCYALGALSIFDGIYDIKEITMTIFQPRREHVSTFTISKKALLSWAEETLAPTAELASKGEGEYKAGSHCQFCKVKAVCRKRAEYNLELACYDFEMPESLEDDEIEVILAKADELVSWVNDIKEYALQQAVSGKKWKDWKLVEGRSNRKYVNDKAVAEKIESAGYDPYEKKVIGITAMTKMLGKTKFEELLSGLIEKSQGKPTLVPMSDKCPAMKNTTINGFKEDNMSNNYKNPTKVITGPKTRWSYANVWDTKSINGGTPKYSVSLIIPKSDAATVKKIEAAIQAAYEEGESKLKGNGKSVPSLKVLKTPLRDGDLERPDDAAYADSYFINANSASAPGIVDADRQPILERSEVYSGVYGRASINFYAFNSNGNKGIACGLNNLQKIADGEPLGGKSRAEDDFATDDDDDFLSMKNISIDLETYSDVNLQKGGVYKYVQSSNFEILLFGYSVDEGVVKVVDLAQGEEIPDEILDALTNEQITKWAFNSQFERICLSEYLRRYYPQKFISYSIAEDTVGDYLSPVSWKCMMTWSAYMGLPLSLEGAGKVLGLSEQKLKEWKDLIRYLCVPCKPTKVNGGRTRNLPKHDKEKRDAFVKYNIRDVEVELSIQGRLSKFPLPDFVWEEFWLDQEINDRGIAFDIEVAKNAIVFDKHSKDKLTAKIPHSTGIDNPNSVMQMKAWLSENGIEADSLDKKAVKELIASTPAHIREVLEIRQQLAKSSVKKYQERNQMENGPLGCTAPTVPEEELQQAVIDAMNAVLESSKDVIAILEENILEVISQDNSVEIEEINKTIAEKQKELLELVHSKKDYSKCADEMEKLRQNKQLLLVKHAQTEGTRQRINELAAYVKTQDTQITEYDDKLVREYIDQIKIYNDKFVVCFKVKMEINVLRMAESKHDKFIRVAEARTNKIIDMIRLLSNCSNTATYEYTDEDVKKIFSALESELKTCKSKYQDNSNKERKFTLRMTIEWKFPHNGFGQVRGVSDAGIETFTGTEIQSLAREICQNSLDAAVEGSNATIKVDFEQYRIPSSDIPGYEQYASKIQKAYDYWSKKNSEKTIKVLTKALNAIKKPNTVVLRISDFNTTGLSHPYEDSDEGWNALTKLDGGATKTGDKAGAFGIGKNAPFTNSDYRLVFYRTLNEDQETAAQGMSRFISFPEDLSNSMNTMTTGIGYYGNPEGNLPVDSISELEKLYQRTEIGTDVFVYGFNAGHEWNSDVINEVLENFLMSIHKNLLSVTVDNKVIDNSTLASYLSTYNSKIKNAYWYYQVLVRPETKVFKKDFHGMGTLKLSVLVDPSEKLNRKILITRSSGMKLFALGNMSRIISFSGVLEMEGKELNEFFREMETPAHDKWLPSRHSTNVPLAKEYNNELKDWIRGCIQTLGEHSSDDEIEVAGLAGVLQKESDKTNQRGDDSNKESLQDTIGSITIQPRTSKTKPKGLFYGNDGNGKSKNTDTEGTIGSDGGDPTTRNLGGTRHRSKKDSHKGRVEQGGHDTVHKRYGGDINQELKNVRVIKTSRNTYRVSFILPRDICAGHVEIVTVGENGKSNRLAIHSASELMGCTGIKKSSEGVSFSSMKGNEKVQFEIALLDNRDYAMEVNVYEHNMNITKRLYTYPVLSEERDDYTDSVFDADVQYKMNGVNNLLFDFDIEMDNKELQKMILEGDAEYVIHIECANTSYRTTIHDISNHVSKEIPIGRINGRIEIIVLIVTKKDVNHFVNSNWDDDYQGLSFELSKGSILAYKNIPAIDIVKNYEEFNSASSIFKVYKRLTTEPKPMEVELSTAQIGIGLGLEEYEIYSRFCDKEEFQPILNSMMVFPALVYVFEELKQENGIENYAGTNWYISLSKAYEKRGVDLENEMLYSDKTSVQLAQEAMELPLNAALRKFADLFETGEEEEDVMKLYFMKKEALDILKSNLDMVYNMYFTEKDNKWLWKVCGGDPFGEFKEIQDFQLAPIDSDMSKGEVEFANCKIIYQHLSFLTESQACDERLWAGLCHSVYYDYLRKRWDYDTKSPKTQKEAVSNIKSRFFFSGGTRAGLFRNSIAKCWWVGRNTYDPSNVANPFEKLDIIGSNDISSKISDIFYSNNFSANPVILNGIVKAFKNFKEENTQLSLKEHIRPTLQFLNAVGGGVVLDCLDEDEIADMLIDNIYGILQGDEQGVEIEEESEEYEDMDVDGNDISEEENSEDSVEEEYIVIGQKVNVRIKETDEPKTILVNYLPNSTKIPPLAKSLLGCWIGDEVSFQGKTYIIEAIQKMIICIGREFGSGGHEIGRKVAEKLGLELYDRDLIDRAAEKIIAMPKDVLEKADEKKRNPWLHEVWYDVPNQELNGMTANDALHLAYNSIIRELAEKGDCVFVGRCADYILEQAKIDHISLFIAAPFEWRVKRKMEQLSIDEKSATAMVRKKDKDRKAYYDYYTGRNWGRPYEYDLCINSSRLGIEATAEKLVEMIRELEKMAICIAYLGVGVVAIPTGIISAGFVEQYQRKSNISDLKDMDIKENTFYGMDSMFNTPQEVVQANMNGAVKKATTSKKKVFFMGIMAGVCIALGAQSSNVAMHDIANVGLARLVAGCVFPVGLMMIVFIGGELFTGDCMMTMACIKKKISVAALIRTLVIVYIGNMVGAVALAYLVYLSGQYNYTSGALGAFTIKVALGKVSLSFLPALISGILCNILVCAAVLMASTAKDIAGKSLAIFFPIMAFVVSGFEHCVANMYYIPAGIFASMNPDYVAKAKELYGITGSQIAALNWGNFFTVNLLPVTIGNIIGGGFIIGGLFFYLHGKNCKMAQNSCESCTYYTYDEDYESYMCDINMDEDEYMRLISDQHYQCPYYRNGDEYMVVRKQMMISEVHTHEDPILTREEAIEILNTPDDQLDALIERAGILRKKYKGNHVSIHILTNVRSGNCSQDCAYCAQSCRSNADIDTYKWVEDEKLYNDNDFVNEHHLSRHCIGLSGMGFTDAEIEQLAGRIRKMKETGTHLCCSIGFLTEKQAKMLKDAGLDRINHNLNSSRNYYSHICTTHTFDQRVENIHMLQRLGFEICSGGIIGMGESKEDVVDMLLELKEINPEALPINFLLPIPGTPLGDQDISGLTYEYGIKVLCLARLLVPQSDIRCAAGREVYFKGHEKELLSVVDSIFASGYLTAGGQGIKDTIQTITDAGFTYEIESAMLQIQHICKEYRTGNLVQKALDDVSLNLRDNEFVAILGPSGSGKTTLLNIIGGLDRYDSGDLIINGISTKKYKDRDWDSYRNHTIGFVFQSYNLIPHQTVLSNVELALTISGIGKEERRKRAIDALKKVGLGEQLHKRPSQMSGGQMQRVAIARALVNDPDILLADEPTGALDSDTSIQVMDLLKEVAKDRLVVMVTHNPELAEEYATRIVNLRDGKIRSDTDEYIVDEQTLKEPEHKNMGKSSMSFLTALALSFNNLKTKKARTLLTSFAGSIGIIGIALILALSNGVNGYIQSIEEETLSEYPLQIQSTGFDITSMMVGNTGTDDKSKDSSGKKNKDGQVKVMEMVTNMFSKMNTNDLKSLKKHLEKDNDALKSYTNAVEYDYDVDPQIYREDSDGVRQVHPDKSFSSIGIGADSGANSMMSSMMSTNVFYRMPKNTSLYEKQYDVKAGRWPKKYNECVLVLSQDGGMSDFLLYTLGLRDQMELDDMIKAFASEEEIKTPSSLGTYTYKDILNKKFKLVNQADYYEYDSQYKVWKDKSDNAEYMKKLVADGEDIKIVGIVQPAEGSKATALNMGIGYPYSLMTHVAEEAKNSEIVKQQKASPDINVFTGEKFGEDSGDNGLDMNSLFNVDEDALQKAFGMGDTDLAGSLGNSLDFSKAVNLQDAFKLDGNTLNLSGLVNLDQVDLNLSGLPPTGLGDMLSGLDVKVKPGGMQKMAVSLMEGYQAYAKTHPEADYSHLGDNFFEYLKTDGAKQIMKKYFSKILKESGKVTITEEKVQKLLTDIMQGFEKYVKDQGIGDISADQYGTYFRQYLQTAEAKQIITDWVNDLYKDVDIEISEADLQAMAQELAAGYLSYAQEKGYADVTKMGENFAAYLGTADGKQRLSNGLSETLDMKSLESQLSSGMNAYMKQAMRAYAKSFGNALETQISSAMEQIVGQMSSGMGKVMESAMTQIGQNLQSVMTDAMKIDTDAFAKAFQFNMTEDDLTELMMSMSGTASATYDSNLQKLGYADFAKPSEIDIYPKDFESKEQVVDYLDRYNKKMEKAGKDEQVISYTDVVGTLMSSVTDIVNTISYVLIAFVAISLVVSSIMIGVITYISVLERKKEIGILRAIGASKRNVSQVFNAETFIIGLCAGLIGIGLTLLLLLPGNMIIHAVADNSNVNAVLPVIPALVLIALSVVLTLLGGLIPSKKASKSDPVTALRTEMYNFNYYTPTKVVFGKNTEDKCGELVKEQGCKKVMIHYGSGSVKRTGLLDKVKASLDEAKIDYIELGGAVPNPRLSLVYEGIELAKKEGVDFILAVGGGSAIDSAKAIGYGVANEGDVWDFYDKKRQATGCLPIGVVLTIAATGSEMSSSSVITKEDGWIKRGYRNDYGRPRFAIMNPELTMTLPDYQTACGCTDILMHTMERYFTNGGNMEITDSIAEGLMRTVIENARILINDPKNYDARAEVMWAGSLSHNGLTGCGAVVGGDFASHALEHEIGGLFDVAHGAGLAAIWGSWARYVYKDCLPRFEKFAMNVMQVDPEGTADDVALRGIEAIEDFFRELKMPTSIHELGIDPTDEELKLMAHKCSIGCKGSKGSAKVLHEEDMYKIYKAALMNWIYNHKRALLHVNLAFIGGLTGAYAILVRGGNFGAAQTMNLIEMVLNFTEMNLTDAFLRLAIFILYGLAIIAAFLIGEHFASVKSYIALAVEAVCIWIAGIIPTSVNPLIALFPVFILNAYQWQAFTTPECYNSSTIFSTNNYKQTLLAWTRYHMTHDLAQKKRALLFTNTLILFHLGVLVGYFAVEYLGAHGIWVAFVPLVTAVGLVIPVGEEQVVKDVEATLKEGIHRTEEVVVRKVMPITDILEKNCRLYGDDVALVEINPEMPETKRTTWKEFDLIEPSRAAYYRREITWNVFNEKANRFANLLIERGIKKGEKVGILLMNCLEWLPIYFGILKTGALAVPLNFRYSADEIKYCVELAEIDILVFGPEFIGRVEEIADEISKGRLLYFVGDGCPGFAEDYNAHTANCSSQSPKIDVNDDDEAAIYFSSGTTGFPKAILHNHESLMHAAKAEQNHHGQTKDDVFLCIPPLYHTGAKMHWFGSLLTGGKAVLLKGTSPKTILQAVSEEHCTIVWLLVPWAQDLLLALDNKELDIADYDLDQWRLMHIGAQPVPPSLIKHWKEYFPHHQYDTNYGLSESIGPGCVHLGVDNIDKVGAIGKAGYGWEAKIIDEQGETVKQGETGELAVKGPGVMTCYYRDPKATAEVLHDGWLYTGDMAMEDEDGFIFLVDRKKDVIISGGENIYPVQIEDFLRTNEAILDVAVIGLADHRLGEISAAIIELKPGVECTEEDIQEFCKKLPRYKRPRKIIFADVPRNPTGKIEKPKLREKYGATHLVAAQNQGMNTNEKKEITIRIAKEEDAEELLAIYAPYIEHTVITYEYDVPTVEEFRGRIRHVLERYPYLVAEVNGEICGYAYASAFHERPAGGWNVETSIYVDQNKKGMGIGTKLYDMLEKILKRQNVLNMNACIACTEHEDEYLTNASIHYHEHLGYRMVGWFTNCGYKFHRWYNLAWMEKEIGEHVADQPPVIAFMDIVEDISLQNGELRLMKTESDKKKSEISAIILCGGKSTRMGKDKAGLLIGKKTFLQQIEEHVSGADEVLLSVKDRRDYPEIEARHIEDLEQDKGPLMGLCSALKECSHERVWVISCDMPLVDWDVAQELEDYLIDGIDAVIPVDKTGKKYVLCAWYRKSVWKILEEQLKTGDYKVQHVLENLRVCYVAVQGITDGPGKFYNINTPEEYRKIIPEKIKEKAQQTPVVSFVAYSGTGKTTFLEKLIPKLKAYGLKIAIVKHDGHRFDIDHEGKDSDRFTKAGADVTGLISSEKAVLMDNRTVDPEEFLKKIDGVDLILTEGFKHGPWPKIMLHRKENGKPMPLRPEECLAVISDVDVEDCENVFPLDDVGKTAFFLLQYIQQNMQHIENLMKLIRTEDAVGHVLCHDMTQIIPGVIKDARFRKGHIVTEEDIPVLLSIGKEHLYVWEKTEGMLHEDEGAERLRRITQNENMHPSVVKEGKIELFADVDGLFQVDVERLYDVNSVDEIMIATRHTNTAVKKGDKLAGMRVIPLIIDEKRLEEAEKKAGPEPLLKVTPWKLKTAGVITTGSEVYKGLIKDQFTPIVEKKLETFGIQMTKHVLCSDDTKMITDAIAEMKEAGVDLIICTGGMSVDPDDKTPGAIKASGAEIVTYGAPTLPGAMLCLAYFEDDTPIVGLPGCVMYAKATVFDLILPRMAAGIKIERRDIIRMGHGGLCLGCKECHYPVCPFGKEAMEPSRVTLEEAQELFQICMRGIKKEEKPAADCLGQILAEPVYAAVTQPPFPRSAMDGFALRSRDVCGADLEHPVTLEVAGCVYAGQKTELILEPHQAVRIMTGAMIPEGADCVVKQEDTDYVRIADPDPDRKTIKIYNNVGLGENYCPKGEDFSAGELLAEAGLLVNSYLLAAVTSAGVRDITVYRRLRAAVITTGDELQNADTSLEPGKIYDANGIWLCARLREMGCEILQYETAGDDRDKITDKISEVLKEADLILTTGGVSVGDKDLVPDVIESLNGRVLFHGIRVKPGMPTMLSVVEDIPVLSLSGNPFAVAALFELLAGGYLADRAEAVYTQKKETKVLRQTFVKTGKPKRIVKGKCDEEGVFLPQIQRNGQLKNGIGSNCLVVFPEGERTYPEGEKVQVIRIMGEFTHFNEQGHAVMVDVSEKADTMREATAMGRIHMSKECFEKVKTGGMKKGDVLGTARIAGIMGAKRTSELIPLCHILNLSKVTVEFEYIEETCEIEARCTTKTVGKTGVEMEALTGVQVALLTIYDMCKAVDKGMCMTGIRLLKKTGGKSGIWEADRETELMIDAAGRVIDYMRISITDRCNLRCRYCMPDGITQVSMAEILTYEEIWKVCILAAELGIQKIKITGGEPLVRKGCADLIGMIKNISGITQVTMTTNGVLLQDNLEALKKAGLDGINISLDTLDREKYQEITGTDACETVRQAVAAAAESGIRTKVNTVLQSDGDKTEWKALITLAESLPVDVRFIELMPIGYGKENTGVSNLELLDEIRKVYPDIRRDSKIHGNGPAVYYQIPGFTGGIGFISAMHGKFCKNCNRIRLTSTGDLKPCLCYGDTYPLKDLLRNGTEEEIRKQIKRAIEQKPAAHCFEEPGAITEAHQMAQIGGMNQKKGVIRGICISPRRGTAKYPVETAKIVPDWGIEEDAHGGKWHRQISLLALEKIEAFREKGADVDFGAFGENLIVEGFDLRNVPVDSEIRIGDAVRLKVTQIGKECHSHCAIYQRMGDCIMPREGIFAEVLTGGMIRVGDCVEVVMPQEDRPYSVAVITLSDKAFAGERDDLSGPAIEKILKDSEEKDHIRFNIKETILLPDGEEGLKKQLIRLADQRQVDLILTTGGTGFAPRDMTPEATIAVCDRMANGIADVIRSYSMTITDRAMFSRAVSGMRKKTLIINLPGSPKAVTEALEYILPKLPHGLDVLRGNVQECGRKMKNQMAKRIASVLLAGVMLVSLVACGENKKTEEKKTDDSKKSSKKETEIQVFIAASLNTVMTELAKEYNEEHPEVKITFNADSSGTLLTQIEEGYECDLFFSAAQKQMDQLEADGLVVDGTRANVLNNQVVVISLKDSGTKVTGLENLKDAKSIALAGGSVPVGKYTRQALVNLGTLKADGEVDAITTDQVSQALGGVEISEEDNVSKVLTAVAEGSCEVGTTYYSDTYGYEDKLNILQVVSYDLTGDVIYPICQVQNDEADKTQTAAAKDFYKFVLSDKTKKVFDAYYFDTDVERMDAVVEILKGLDYSPLYVSLKTGIVATIFSFFLGLFAARRVIKAGPKVKAIADGILTLPMVLPPTAAGFFLLLLFSRRRPFGILLYEQFGIKVVQTWAGCIIAATVIAFPLMYRNARAAFEQIDVNLIHAARTLGMPEYKIFWKVAVPSAGPGLVAGTILTFARALGEYGATSMLAGNIPGKTGTISQRIAMVIQDGNYLTAGIWVVIIMLVAFVLIVLMNLVTGQNTKNIRRWMAMEVKIHKKLGEYELDVHWKSTKKRIGILGASGSGKSLTLKSIAGIEHPDQGHIQIGDHVLYDSDSRICLKPQKRNVGYMFQNYALFPTMTVEQNVGAGLAGNKKKKQEQVQKMIRHFRLEGLEKRLPRELSGGQQQRVALARIMAYEPSVILLDEPFSALDVFLKDRLQQEMMELLSDYDGTVILVSHSRDEIYRFSEELLVIDDGKQICYGDTKAIFDCPEQVEAARLTGCKNIVQVKRLDEHSIEIPDWGTRLHLEQEIDAEITHIGLRAHEFIPVWGEREDNCIPVKEKGKAEFPFEWKYFLKGETEESDDICWYVQKNLWDELTEKGIPDYLKLPEKEILLLKMYTIGTHMSIAGGIAKTAENVVKMNANTMQIFSRNPRGSSYKTYAQEEVEKFQQIRKSHAFGPVLAHAPYTMNLASATEKTYEFACTVIREDIRRMDELKIENLVFHPGSHTGIGEEAGITNIIRGLDQAITGTENIKVLLETMSGKGTEIGYRFEQLKQIRDGVQHPERIGICLDTCHVFAAGYDIVHDLDGVLDEFDRILGLELLRTIHLNDSLMPFGSRKDRHAVIGEGEIGLEALLNVLRHPKLKDLPFYLETPLDDAGHKEEIARLKEYLGEEMKKLEYIARIHTDFPTKFGIPRQSGLVSTKGTIVFEPEYRKEEALKGLEEYSHLWLIWEFSEVVRENWSPTVRPPRLGGNKRCGVFATRSPFRPNPIGLSCVRLLGIEKRPEKGMVVEVEGADLMDGTPILDIKPYLPYVDCMPDARGGFADRVKGYALEVEIPEELLLKLPNEQQGCVREILAEDPRPSYQNDPDRVYGMEYAGYEIKFRVKDYRLTVCEIERAAADRTIKMKYYLAPLEGITTYIYRRAYHTHYRPMEKYFTPFLVPHTKKDFNTREKNDILPAHNPGMNLVPQILTNDAKGFLDTVEKLKGYGYDEVNLNLGCPSKTVVSKGRGSGFLIHTEELNRFLDEIYAKADVKISIKTRIGKFDADEWGELLRIYNQYPLEELIVHPRVQQQFYKGHPDLDAFADAVKECKHTLCYNGDIFTTEDMEKLKKRFPEASCIMLGRGILRNPELIEIMESGEKKIDAKKLRAFHDQIYQDYQEVSCGDKNVLFKMKELWCYLGTLFPDKEKQLKKIRKAEKLDRYEAVVEELLSHNYIDLKMDRLNELIAENLKDIRKGKGLSLEQVSSLTTISKSMLSQLERGEVNPTISTVYKLALGLKVPVTAFTADKPQPFFGTGKKEVDPLVGDDGRYRLYPIFSFREGQDFEIFDLEFDEGGMMQANRQMNGTREFITVYSGELTLIFKDHEYVLKAGDAASYNAFDDYVYKNTGKGMVTANIVVHYSNMEDQKQRVYDALNKMGIKYEVVEHEPVHTMEDMDRLGLPEKGTLCKNLFLRDSKGKRHFLITADEKTKLDLKALGRQLGAGTLSFASEERLEKYLGVKQGSVTPFALMNDTEHAVEFFIDKNLSRCKSMGIHPLENTATVFISFKDLDKFLWNLDVDVVKIKLMEEWQNGHDQPGYHYHQEQDKKRKPIETPGKRFWKMWGPLLIKWGIGIGVGMVVMAAMMVAYMKTHYQTQAALEALMSDQNKLMGFYEKMLNKYIDYTTWVEGLSALVTIPVMAILYHGDRKKEKKAGIIPDKKAPLWKYPAVLIMALAMSLGLNNLIIIGNLSAVDASYKTTMNAMYSAPLAIQILCLAVLVPICEEYVFRGLFFRRMEKESSFVYAMVYSSVVFGVLHVNLVQMLYGFLLGLMLAYVYEKYGSLKAPAAAHMAMNLLSVLATRYGLYNWMLKDNMRIGVITVVCAMIASTMFVLIQRIEEKPELKTENENLTMMKEGNVVQHHGLYRSEFEHDNCGIGAIVNIKGQKSHDTVANALKIVENLEHRAGKDAEGKTGDGVGILLQVSHRFFSKVCKPLGIFLGSERDYGVGMFFFPQDELKKNQAKKIFEVIVKNEGMNFLGWREVPVKADVLGSRAVECMPCIMQGFIERPKKVEQGIDFDRKLYIVRRVFEQSADDTYVASLSSRTIAYKGMFLVDQLRLFFPDLQDPDYDSAIALVHSRFSTNTNPSWERAHPNRFIVHNGEINTIRGNTDKMRAREENMESECMKGKLHEVLPAVNTSGSDSAMLDNAIEFMVMSGMDLPLAVMIAIPEPWANNRNLSQKKKDFYQYYATMMEPWDGPASILFSDGDCMGAVLDRNGLRPSRYYITDDDTLILSSEVGVLDIPPEKIVVKERLHPGKMLLVDIKKGKVIDDEELKETYASRQPYGEWLDNNLIELKDLKIPNQKVPSYTAEECRRLQKAFGYSYEEVKTSILNMAKNGAEGTAAMGIDAPLAVLSDMHQNLFGYFKQRFAQVTNPPIDAIREKIVTSTTVYIGEDGNLLEEKAENCKMLKVNNPILTETDLLKIKNMKEDGFKVAEIPTIYYKNSSLEKAIDYLFIEVDRAIREGANILILSDRGVDEYHVAMPSLLVLSGLQQHLVRTKKRTSVGIVLETGEPREVHHFATLIGYGACAINPYLAHESIKQLIDTDMLQKDYYAAVDDYNNAVLGGIIKIASKMGISTIQSYQGAKIFEAIGLKQEFIDKYFTDTVSRIGGIGIEEIAADYIARHSQAFDPLGLEVDMTLNSVGQHKLKSGGERHLYNPQTIHMLQESTRRGDYDMFKQYTDMVNAEGEHINIRGQLEFNYPKKGIPIEEVESVDEIVKRFKTGAMSYGSISKEAHETLAIAMNQLHGKSNSGEGGEEIERLDTNRCSAIKQVASGRFGVTSRYLVSAQEIQIKMAQGAKPGEGGHLPGGKVYPWIAKTRHSTPGVSLISPPPHHDIYSIEDLAQLIYDCKNANKDARITVKLVSEAGVGTVAAGVAKAGAGLILISGYDGGTGAAPRSSIHNAGLPWELGLAETHQTLIQNGLRERVRIETDGKLMSGRDVAIAAILGAEEFGFATAPLVTMGCVMMRVCNLDTCPVGVATQNPELRKRFRGKPEYVVNFMRFIAQELREYMAKFGVRTLDELVGRTDLLKVKDVPTSERASTLNLEQILDNPYEGTKTPMTFNPKKVFDFELEKTLDEKVLVKELLPAVEKKQKRSIEIDVTNTNRTFGTIFGSEITRRYPEGLDEDSYVVHCKGAGGQSFGAFIPKGLTLELTGDSNDYFGKGLSGGKLVVYPPKGIRYKAEENIIIGNVALYGATSGKVFINGVAGERFAVRNSGATAVVEGVGDHGCEYMTGGRVAVLGGTGKNFAAGMSGGVAYVLDMENDLYTRVNKEMVHIEHVTTKMDVGELKSMIEEHVANTNSELGKKILDNFTEYLPKFKKIIPIDYERMLTTILQMEEQGMSSEQAKTEAFYAIKEGRMGKATGFMDYDRQDKPAEDPKERIKHFKEFHTPLSKEEQELQGARCMACGVPFCQSGQMLMGMASGCPLHNLVPEWNDLIFHENWEEAYYRLKKTNNFPEFTSRVCPALCEAACTCGLNGEAVSSKANEYSIVENAYKKGYATAKPVKVRTGKKVAIVGSGPSGLAAADMLNRRGHSVTVFEREDKIGGLLRYGIPNMKLEKQFIDRKIAIMEEEGIRFVIGCNIGKDKKAATLLKEFDRVVLCCGASNPRDIKVPGREAEGIYFAVDFLKSTTKALWKNAKQNADGTYDLNLKDGTYISAKGKNVMVIGGGDTGNDCVGTSMRHGAKSVLQLEMMPKAPDERTEMNPWPEWPRVCKTDYGQQEAAAVFGHDPRVYQTTVKEFKKDKKGKVCKAVLVKLEPKKNEKTGRMMMTEVAGSEYTVDVDLVLIAAGFLGSQDYVTKAFGVEVNERTNVKTAPGKYDTNVKNVFTAGDMHRGQSLVVWAIREGREAAREVDISLMGYTNMYVQMNKHGIRLITAVVTSSMIVTPVLAAPSVDDLKKEKAAKQNEVSSLQSQLTTLMGKVNTLESELIQTGEDITKAQSDLVVAQKKEKEQYAAMKKRIKYMYEAGNDSAFETLVTSDDFTDLLSKAEYVQNVHSYDRKQLQEYVETKQQISDLKDSLEKDQKELESKQVEYEKQGDNLNNLITSKSSEVANLDSEIQAAAEAAAKEAAERAAKEAAEKAAKEAAKKQQASAANNSTSSNRNNSTTSNNTTSNKNNTSNTTRPSRPSGNNTSSSTTKPSGNNTSSNTTSGSNANGGTIVSRAYSQLGKPYVWGACGPSSFDCSGFVSYCLTGSYTRLGTTLTFMGWTRVSNPQPGDVVTTATHCGIYIGNGQMIHAPHTGDVVKVGPVQSGMIYVRRMSVISMKQLLEAGVHFGHQTRRWNPKMAPYIYTERNGIYIIDLQKSVGKVDEAYQAVADIAAEGGSILFVGTKKQAQDAIKVEAERCGMYYVNERWLGGMLTNFKTIKSRIARLKNIERMSEDGTFDVLPKKEVIQLKKEWDKLEKNLGGIKDMKTLPDAIFVVDPKKERICVQEAHTLGIPLIGIADTNCDPEELDYVIPGNDDAIRAVKLIVSKMADAVVEANQGVAGEEEYVEEAEEAAVEEMAVTAKMVKELREMTGAGMMDCKKALNETDGDMDAAIEFLRKNGEAKAVKKAGRIAAEGIVMADVKEDKTAAIVEVNSETDFVAKNAEFQGFVKAVVNQAIASESTDMEGFMAEAWNEDASKTVQDALNEKISVIGEKLSIRRFEKIVTDGCVVDYIHGGGRIGVLVEADTDVVNDEIKACLKNVAMQVAAMSPKYTSRDEVDASFLEHEKEILLAQAKQENPNKPDNIIEKMIIGRLNKEMKEICLLDQVYVQDSDLTVAKYVEKVAKENGANMTVKRFVRFETGEGLEKKNEDFAAEVAAQMNAIAENIKTMLTIRILLWYINLAVALDKAVRMKDINWAVLGTGVIANEMAVALKKNGKNIYAVGNRTYEKAVAFGEKYGIGKVYADYNEMFTDPEVDVIYITTPHNTHKKFMRQAIENGKHILVEKSITLNSDELNEMAALAEEKHVIIGEAMTIYHMPIYKKLKELLETGVLGKVNLITMNFGSFKEYDMNNRFFNRNLAGGAMLDIGVYALSFIRWFMDSKPDQLLSQVKAAPTGVDEQAGLLLMNPEGQMATVMLSLHSKQPKRGMISCEKGYIEIMEYPRAWEARITYVETGDTEVVRAGENADALAYELADMEKAIAGDEECMHFEYTKDVMDMMTEFRKSWKFTYPEEEMKLAVFFPGIGYHCDKPLLYYSRKLVQEYGYEKIVTLNYTYDGKNLRGNEEKMRQAFDSLYIQAENSLKEIAFDQYEQILFISKSIGTIIASAYAEAQRIPCRHILYTPLKETYAFGHEAAVAFIGNSDPWSDVKKVADLSEKQNVKIHIYEGANHSLETKSVRDNLDILKDVMEKTSRYMEESKYERYMPGRNRNRYTAAVSNKRIKENLVKVDAEFAEDIHIRIPVIPTVNMNENNMKDTIKFLSNLKHIKDIELLPYHRLGLETYERLGRVYELKDVEIPDMEMLKKMAEVIRAEDPEAAVKVKGEMTPGILPVSGNTPFGLEVGALPSGRHAWKPLADGVSPNGRTDTEGPGAVLKSVSHLPHDRFVQGTLLNMKIEPEMLNSENGIMQMMALLKSMCSLGIFHVRFNVIDRETLLAAQERPEEYRGLLIRVAGYTAYFTELGKDVQDEIIARTEQESLYGCSVEMKDDKKEKSEQRYMERIRLIKDRVVNTRPEMDLENAKIMTESFKETAGEPLCIRKAKAFRRQCREKTVKIWDQELIVGCSGMIMKQRMRMLSEYGTYNTELVSDGILNREEKSKELLMGTEMSVTEVAYAAGFSDSSYFIQCFRKYEGITPGEYGKCMKMEDGIVVAYEELSKEELLQLKSELEAQFDEVKAKNLKLDMSRGKPSTEQLNLSMDMMDVLKSDSDLVCEEGVDCRNYGVLDGIAEAKQLLADMMEVPKDNIVIFGNSSLNVMYDTIARSMTHGVMGSTPWAKLDKVKFLCPVPGYDRHFAITEYFGIEMINVPMTPTGPDMDMVEELVSTDPAIKGIWCVPKYSNPQGITYSDETVHRFAKLNPAAEDFRIFWDNAYGIHHLYEDKQDYLIEILMECKKEGHPDMVYKFSSTSKISFPGSGIAAIAASDANLADIRKQMRIQTIGHDKLNQLRHARYFGNIHGMVQHMKKHADILRPKFDIVLKTLDKELGGLGIGSWLAPRGGYFISFDSMDGCAKAIVAKAKEAGLIMTGAGATFPYGKDPKDSNIRIAPSYPTVEELKVATKIFVLSVKLVSIDKLLQSKMEQKIIATVGGHQITEAEVEAFIHSLPREQQAYAAHPDFRKQCEEQLIAVYAFAKYGEEEKIDETEEFKNVMENARKDILAQMAMRKLFATVNVTDDEIKEYYEANKSKYSKGASVHAKHILVDNEEKCTELLNAITSGEKVFEDVAKESSTCPSGANGGDLGEFGRGQMVKEFEDAAFAAEVGHVVGPVKTQFGYHLIKVEDKKEAGESSLEEVKDQIRAELSQKKQEEAYRAKVDELKKKYMEMKAKDWKKWAKCAGIRAIKTVAQTAIATIGTVTVLGQIDTKLVISTSMLAGILSLLTSITGLPECNSENKMYINTAEAISGIPSSWPGYTLEIGSSGNKVLQMQEQLNVIAGAYPAIPKITADGIYGPATAESVRTFQKVFGLPQTGTVDYTTWYKISEIYVGVSRIAELYGMSVKYAYGYIRVSTHDQEEISPDSQEHLLRDYAAKNNIVILKIFTDLGISGRKANKRPGFQEMIGLAKGDDHPVDQILVWKFSRFARNQEESIVYKSLLKKQHNVDVVSVSEPLSDNPFGSLIERIIEWMDEYYSIRLSGEVYRGMKENALRGAYQARPPLGYKVVEHGKPPVIVPEEAKIVRTIFEKYTNEGMSFFDIARYLNSLGLKTSHGKPFERRSVEYIIQNPSYCGMIRWNRTENSTNRIKDKDEWIVTEGQQPAIISKELFESAQKRFKATYKPVGKRPSSTYKHWLSGLLKCPDCGRTLTSTTMKRVNGEKYSYFSCYGYSKGKCKKPNGISSLVLEKEVLASIKEILDTKDIVYELREYQPTEQFDERKAITEQLESLTGKEERIKASYREGIDTLEEYKANKAIIQKERESLEQQLKELKKAAHKSDQDPADAMLQKVRSVYDILISNNYTYVQKNEALKQIIDKIIYDRKNDSLKIYFFLYRKRDSYLASFDGAGMLNSGSHKVLGTIVIRTSTKLTATQQNEFTNNITNKLLELQLEDEEQTMYVPEVETVALNKETETHHALADGTVELLDTVKYRNLLPGRNYTLHGMIVEKETGNPVSEERTLEFVPEKSEGSVELGFEISADELCGKTIVVYEEIKADGKSIAEHKDPEAKEQSIYFPEIGTKALDENSKTQEGEAKEKQKIIDQITYKNLLPDETYVLKGVLMDKETGKELLDENGKRVTAGISFVPENEEGTIEMTFELDARMLAGKSVVVFERLYDEEEHLIAKEEDIENADQTILYRKQEIPKNTIVEKPGHNSKEVRKSPKTGDENRMDLWLVMLCVFGIAVVTEIVIYKRRNRMKEIGNKEYKNITKDTLLGTVGQNRRLEAIRITGKESFYLYRVHQKSIGWSEWANNGEWAGTTGKGLQMEALEIKKSMFSVEPHVQSKGWVDYGMITKDTIIGTVGEKKRIECLCFEGDFEYRVHIQNSGWTDWTRADGVATLGTVGQELRIEAIQFRMDEKNDLIKVGKYDLRYNELLSIDIEELDIFRSKGLPAHMVKRKHFNCLKYIDYLPEIIENPDYVGVNPNENDKSIEFIKKYSKNVLVGVKLEKDGQYLYVSSMYDIQGSKISRRLYSGRIKNANIDNDENEMDYLSRRIVESEHETVRQQWNKASLEKSVSEIHERQQDKEKHTMARVLRKVKEFEFKNGWLGEYVFQDDRGRVYASRISDCAVNNTTTAEFHNKKSIHAIRRTLNSNMKCAGVSGTVAASLLGHTEKVNEENYTYDVSSMEEKSKFMECAGRVMSSKIVLIDGHSILNRAFYGLPDLTNAEGLHTNAIYGFLTIMFKLLEEEKPEYLTVAFDVHAPTFRHKMYAEYKGTRKPMADELRQQVPVIKEVLHAMGVKTIECAGLEADDLIGTLSNRCENEGMEVTVISGDRDLLQLATEHVKIRIPKTKQGKTEIEDYYAKDVEERYQVTPKEFIDLKALMGDTADNIPGVPSIGEKTATKIITQYHSIEEAHEHVDELKPPRASKALSEHWDLAVLSKKLATINVKADFPYELFEAKLGNLYTEEAYIFFQKLEFKNLLSRFDVSAPANKVEDGFKIIASKSEAEKVFVQAEEASTIGAVIFKDLENVLPLFADQAGLGGIGLCFSKEESYCIKVEKDITGEWLLKKLADVAEKAETYAMFHLKESMEQVTIRNQANCFDISVAAYLLNPLKNNYTWEDVAREHLGLMIDEKIDQDMKACYESYVNYASVEVLRQKLRDTKMDTLFRDIEMPLVFTLFDMEQNGIRVEADALKQYGDQLAGKIAELEKEIYEEAGETFNINSPKQLGVVLFENMKLPGGRKTKTGYSTAADVLEKLAPEHPVVAKILEYRQYTKLKSTYADGLANYIQDDGRIHGKFNQTITATGRISSTEPNLQNIPVRMELGRLIRKVFIPEEGYRFVDADYSQIELRVLAHCSGDEHLIQAYKEQSDIHRITASQVFHIPFDEVTPQQRRNAKAVNFGIVYGISSFGLSQDLSITRKEAAKYIDDYFATYPGIKTFLDHAVTHAKEEGYVVTLFGRRRPVPELSSSNFMQRSFGERVAMNSPIQGAAADIIKIAMIRVNQRLKDQKMKSRLVLQVHDELLIEAYEPELDEVQNILKEEMEHAAELKVPLEIDMHTGDNWYEAKMKIIGITGGVGAGKTQILEYLNNKYGATICMTDEVGKKLQKKGTECFDEIVAHFGNEILDEKGELDRAKLSDIVFADRVELSVLNGIVHPRVKEEIQKKITREERKNTNLMLIEGALLIEDHYEEICDELWYVYVEDSIRRKRLKYARGYEDSKVDQIFEAQLPKDLFMRHCDRVIDNSGQFEETKIQLNKIVEDLMRLCSIASGSSGNCIYVGDDQTHLLVDTGISKKRIEEGLSKLEIKGDELEGILITHEHVDHIQGLGVFSRKYEIPIYATPGTIEGIRNCKSLGKLPEGLLHEIEIDHSFSLGTLNIDPFAISHDANEPSGYRIENEKKSVAVATDLGVYDDYTVEHLSDLNAVVLEANHDIHMLEVGPYPYPLKRRVMGDRGHLSNELSGKLLCDILHDDLQYVVLGHLSKENNYEELAYETVKLEISIGDNPYKGDDIPMMVAKRDQVSDIITLMKKCVITVVGKDTVGIIAKVCEYLAGTNINILDISQTIVDGYFNMMMIVDVTNCSKEVAVVSKELEEIGTSIGVTIHCQREEIFEKMHRLMINRYEVYETNQMIAEENLDVRTITLGISLLDCIDADLDKLNENIYNKITTVAKDLVKTGEEIEQEFGIPIVNKRISITPVALIGGAACKSPEDFVTIAKTLDKAAKEVGVNFIGGYSALVSKSMTKSDENLIRSVPQALACTDRICSSINVGSTKTGINMDAVRLCGEIVKETAEATKENDSLGCAKLVVFCNAPDDNPFMAGAFLGVTEGDAVINVGVSGPGVVKHAIEQVRGKGFEELCETIKKTAFKVTRVGQLVAGEASKRLGIPFGIIDLSLAPTPAVGDSVAEILEEIGLERVGAPGTTAALAMLNDQVKKGGVMASSYVGGLSGAFIPVSEDKGMIDAVEMGALTIEKLEAMTCVCSVGLDMIAIPGKTTASTISGIIADEMAIGMVNQKTTAVRLIPVIGKDVGETAEFGGLLGYAPIIPVNEYDCSAFVNRKGRIPAPVHSFKNMKTVGLITEYNPFHNGHLYHIEKAKELTGADRVIVIMSGDYVQRGTPAVLSKHSRAHMALLNGASVVLELPVCYSCASAEFFAKGAVSVLDGLGCIDALCFGSECGNLEHLTSIAHLLSAEPETYRHHLQSSLKNGMSFPAARCHALEKMTGDAYASQILSDPNNILGIEYLKALKELNSPIVPFTLKREFSGYHDTELHDCSSSASAIRKVLMNIPASPYLPKNISAQLSEQLPPGSLSIIQNEWNFSCPVEADDFSLLLKYRLLSEPHESLCKYQDVSEELSNRIIRNRNQFRSFGQFCTLLKTKELTYSRISRSLLHILLSITTEDMHAYQDNSCSYARILGFRKEHTDVLRAMKDHASIPIITKLGKSASLLSPEASRMLNQTSFASDLYESVISDKFGIPFTSEQQKQIIRVMEEKMNEEQSLEDGQREEDDIDYVEDREELTEERIKDMLDAREYKELKEELETNMYPVDLAEILEEFDQKHMVLVFRLLAKEEAAETFSYMDSDTREDLINALTDSELEEIMEEMYLDDTVDVLEEMPANVVDRLLMVTDEEKRQQINQLLQYPEDSAGSVMNVDYIALRREMTVAESILKIRQVGLNRETIYTCYVTEQRHLIGQVDVKELLTSSESKTIEEIMDTNMLYARTTDDQEDVANTITKYGLIALPIVDHENCMVGIVTVDDAMQVLQEETTEDISIMAGVNPNEDSYFGTSIFEHVKSRIPWLLFLMLSATVTQMIMNSYENALALMPQLAGFVPMLTGTGGNCGSQSSTLVIRGLAVGEIEFSDLFKVIWKEIRIAFCISIILSVVNGIRIMLMGQGDATMAFTIGLTMACTVLIAKVVGCTLPLVAKKIGLDPAIMATPLISTLVDISTISVYFAIVSHVFQLMGFIDEIKAKAKSCKKTIVLPESEDIRTYEAAEAILKEGTANLILIGSEMAKKILITGGAGYIGSHTALELLNEGYEVVVYDNLCNSSKESLKRVEELTGKTITFYEGDVMDEAALKAMLEKEGVDAVIHCAALKAVGESVQKPLEYYRNNITGTLTLMDVMKQTGVKNIVFSSSATVYGSPEEMPITEECPKGQCTNPYGWTKSMMEQIMTDVQKANPDMNVILLRYFNPVGAHESGRIGEDPKGIPNNLMPYISQVAVGKLEKLGVFGDDYDTPDGTGVRMNPVTREQRDEAIAHFKYEGTLVKDCPYGSGHINDTFLLIFEIAEMGRIKVILQRMNSTAFPKPVEVMENITGVTSFLKKKIIENGGDPERETLNVIPAVDGKPYYIDSTGDYWRSYKFIIDASTYDLVEKPEQFYESAVAFGNFQSLLSDYPAETLHETIEKFHDTRNRFALFKKAVEEDVMGRAASVEKEIRFVLEREEIANCFAEMLDRHELPLRVTHNDTKLNNVMLDDKTGKGICVIDLDTVMPGLAMNDFGDSIRFGASTALEDETDLTKVSCSMELFELYTKGFLKGCGGKLTSKEIELMPMGAKTMTFECGMRFLTDYLQGDKYFRIHREGHNLDRCRTQFKLVEDMEQKWYTMNEIVKKYSNNMNKPVLVIMAAGMGSRYGGLKQLDPVDNDGHIIMDFSMYDAKRAGFEKVVFIIKHEIEEEFKEHVGKRMEKYMDVAYAYQNIDNIPEGYEVPEGRVKPWGTAHAVYSCMDEIDGPFAVINADDYYGVEAFKLIYDYLSTHADDDKYRYTMVGYHLANTVTDNGYVSRGVCETNENGELISVTERTRIEKYNGGVAYTEDDGNTWVQVPDDTTVSMNMWGFTKSILEEIKAGFPAFLDKGLQENPMKCEYFLPTVVSNLLAEDKATVSVLKSADKWYGVTYKEDKPVVVAAIQRMKDEGLYPQHLWEGKMDKNFGSMPLEKKVEYLWMYYKIWLVILAVIIGVIYLGCTMYKGRHTTVLLNVAVTGGDSQKAEELNKDFCKYAGIDKKDGIIRIQANIPEDGGSLSSKTALTTLVGADAVDVLICREDVYQEYKKQDGFQETIDFPEDNMLKKKKIISYDDAHAAIMVNAQNQKMAEKFISYLEQLNHINNANMEIKQIRMGIVGAGTWGRTHASIYAEHLFADPVAICDMNEARAREIADEFGIRKVYTDYHDMAADEEIDAVAIVTPDFAHADIACAMADAKKDILIEKPLATTKEDIARICEAVEKNGVRCMVDLHNRWNPPFNTAKQEISSGKLGKPYTAYIRHSDVKWVATDMLSWASKSSILWFLGSHSLDSLRWLVGSEAKRVYSVKKEGILKGLGVDVPDIYLTTIEFENGVVAHMENGWVTPNGNRNINDFRCSVMCTEGMISLDLSSHNLIEEVTEEKATVPDILVSNMVFDRCKGLSYESIRDFVDRLVDGKEFRVTLEDSRRTALAIIAILESAETGMPVEVEYMKKRTGRKVITVILVVIVCMFALFPFVWMISTSFKTAGEVYSKTPSFIPKAATMQGYKEMLTTHSTTFNFMQWLGNSVIVSLLTTAFSMIIATLGGYGISRFRFRGRGFLSYFILTTQVLPGSLLIIPLYVIMGNLQLLDTKIGLVAAYCTFSIPFCTWMMKGFFDTIPISLEEAARVDGAGRFRIFATVILPLTVPGLVATGIFSFINGWNEYLFASTFMKSYENWTLPIGIASFSGQYATNWGTLMAGAVLITLPVVIMFLLLQKHLVSGMTAGAVKQMNQTKKNGNWKRKMEPYAFLVPLVLILFLFLVIPLVKAAIMSFQYYYVTKPSPNGHYFVGLENYGKVLQDEYFFNSVKVTLIYIVVTVAGRYIIGFITALLLNTKFLGRGLARALIIIPWAVPEVVACLVWILMYDKDYGIINFLLNNAGILSHNIAYLQDVSVALPAAMVVNIWKGFPYVAIMLLAGMQSVSTDLYEAADIDGATTFQKIRYITIPAIRSVSTTVFLLLIIWTIKDYAIAYVLTKGGPSRATELLTIYIQQTGFKYFDFGKASAAGMLMLLVALAFTFFYFKVLNKEEEMKKRRKVLSVMLCAAMIASLAACGSKGDDKKSSDDGGKVKLTFSTSVYVEEPHQKAIDALLEAYSKKEPNVEIEILGAGYDGYWDNITTEILSNNESDMIQVYPENISTYNAIRDGGTFMDLSEYMSDDLKEKLVGQDMCDVDGQTLAISSYAWGTTGIFYRKSMLKDAGVNPDEIKTQEDFRKACKKFTDDGKYAMGVVSGTHAFTVSEWNRLIARPVSNGLYFPNGESEPYTADNVNINAPENVWAAQWWQDFILKDKAAKLVTDKKDSREMFWNGDVPFNMDGPWFVGMCKERDESLMDDIGIIPQFDVVYDGTTYKPNPTNYPLVTMISKNCKHPKEAYAFLEWMTTDEAQKIIADCGMIPSNTDYSTSDEYIQNHELEHKIVEFMQNNYTDLVADPNISQLGEISQIMLDAAQKMFSEQAADVQEEMDSAQKQVEEVMSRDAEMYKAIIIDDEPWTIIDIEKTFSLEDMGFEIVSSYRTPQKALPAIISKKPDLVITDIRMPGMTGMELIKSVRSQKINCEFIIVSGHSDFSYAQEAISYGVAGYCLKPLDPHETSEALNRAKNHLDSRKTITPEPSYLDDNFEGLRNYIITHFSEKLTLKSLAAEFNMNPNYCCSLFTKYLGQTFSAYLTELRITEAQNLLHNSDYSLEEIASLVGFKDYFYFSKVFKKYCKYSPKEYRTLPHMKKSLSRQFIALLLIPVCIILVINFCIIIHLHKSQNEELKNYCISTLENINVNVSSMTTSMKKTATVFSSQKETQAYLESSSSDSHQLQRQSYSELIGMAQSYTPGLIDILMWDQTSVTSLISYIPADMEDFVVNQFQDSRNDTASYFHFYIQPATDTPYMMYFAPIYLTSFSENFGKYVGNIAIICKTDALYKLVNASTDISLTISDRTTNQILYSNAVARRHIPARNNFEFFKKTMELSNSNLDITAIAYNGQIHLLQGQESQLLLSLAILLLVYILLVILAVQHLIIHPIHQLNETIENLDYKNNELHLQTNLKNEIGSITSHVNHMLDRISSLNQRDIESQARIYEMELNKKQTQIYAYQSQINPHFLYNMLQCMRGISLMHDIPEVAQICTNMADLFRYSIKGAFLVPLENELNIIDKYLYMIEVRFQGRITYKLEVSENTKDCLIPKMILQPIVENAIFHGLDEIEEGGIVIIKTTRSEDDLYITVTDNGVGFSKEKLYDLTRKLEEEITFINNSSSETSDNIGVINIHNKIRLYEGNNYGLSINSIPNHTSVTLHLNAKQQTTTMSRFFNPDNPIMEFIAKIFDLILLNLIFIFSCVPIITIGASTSALSYVTLKMVRGEDPYIWQNFWKSFRQNFKQGTLIWVFSILVFIFLGMDFYIINSQNTVLFAVIRILLWCVCLVALSVFLYVFPVISHFVCSTAQALKNAVFMTFGHLPYTLVMLVITGLILYLCACSVKTFALVVVISGICGFSVVAFIYSILFDRIFKKYEPKSPDNIEMKSKNSRKIIVHILLLLGITITVFPFVWMILTSFKTVGEAMQIPPTIFPKKFLTDAYSSIVTALPFGRVYLNTIISTVVTTVVQVLFCSMAAYAFARIEFPFKNAIFVLVLSVLMVPGQIFLIPQYRIVQSLGLLDTIPALFLPNLFSAFGTFLLRQFFMSLPKELEEAALLDGCNRFQIFGRIMLPLTKAGIVSLVIFTAKFAWNDFMWPLIVNTSMDKMTLGPALSTLQGQYTTKYPMQMAGAVMAVIPIIVLFFIFQKQFIEGVAQSGIKGMAEGKSKTGVVKKRASKREKKDWIAAYIFIAPVTLGLLVFYIWPFIQNIWFSFNEVSKFNVATFCGLANYQKLFHDGEVLKTFGNTLKYVVVTVPVGLFLSILIAALLNSKIKGTSIYRTLYFLPSVTMAAAVAMVWKWIYNEKMGILNSAIRALGGKGIGWLTDPKIALYSVMIVGLWMSVGYNMIILLAGMQGISKSYYEAAQIDGAGPIQLFFKVTIPLLTPTIFFVMITSIISGFQVFDVIYMMIGKTNPAYANTQTVVMLFYRQAFDYGYKGYAAAISILIFAVIMLVTVIQMIGQKKWVNYDMKKNMRKVAALGLCVALGATMLTACGGSKGESASGGKTELNFGIWDENQRPAMEKMVKAYEKENSDVKINIQLTPYKGGEYWTKLEAAASGGKAPDVFWLNVLHLDSYVEGGILDDLTDKIKDSDIKDSYSETLVNNYVRDKKNYAVPKDFDTNAMWYNKEIFDKCGVPYPTDDMSYDDLVATAKALKDSGKLGDGVYPFACPVDFQTWYYQTVYANGGYILSDDKKSTGYDDPKTQEGIQCWIDMYNEGLSPSASALSETTADAMFEGGQLAMNFAGSYMVPEYASNDAIKDKVDCVEIPTFNGKEDNCINGLGYAVFEGSKNKEAAEDFAIWLGSKEAQEIQGKTGVVISARTDAQKCFAEANSQYNLAAYTNHADEAYPLPVCTKAAELYDLEATELQKAYNGEESLSDVCKSLTKQADKLLQEMSKQMTVAIAGLGSRGRDTYAKAAKIYPDKMKIVAIADIDPEKVKLTAEEYDVPMSHCYESAEDMLKEEKLADVMIIATQDRQHVGQAIKALKKGYHLLLEKPISPDLGECRKISEVAKECKREVVVCHVLRYTPIYQKVKEILDAGTIGDVISIMAIENVGWFHQAHSFVRGNWANSDETSPMILQKCCHDMDLYLWLAEKTCRSLTSYGDLNYFTPEHAPEGCTGRCLEGCKAKEKCIFDAEKIYLEHERIGYRQGNRGWPLDVLVPSGPTEEKLIEALKTGPYGKCVFHCNNNVVDHQVVNLNMTDGTTMSFTMCGFTAETSRYAKFMGTRGEVIVDMQPDEKESKIVIEYFDPGRTKEVIDVAALSDDFSGHGGGDNKMVEEFLDIISGEKTESTYITSLDRSLQSHYCALAAEYSRLHDGKAVEIDTFRMLDIKINAIQLRMDESDLRFSFCKGETEWSWTKDYRPKMECKEGTVFFDEALEIHHELVQNGIGKGIRSSFAGFEIEGTKVPYAFETYAWIEETTEDIFFEWVPICEEGITVEKVFWPGEMELEEKKNDWYTLLNMQQGVLIPNDWETELTAIPFDGFFETAGGYMPWFSQFKGRNGYIAICTTPWNAGYQAEHPENGPYTHVGVRFEPSLGRMDYKRVVRYTLIEDGDYNDACKIYRDYVREQGNLCTLNEKAARVASVDDLIGCSFIHKGIKTFVQPESDFFDPENPDKNNNLTPFAVRTKEMKELHELGAGKLYLHLDGWAEPGYDNKHPDYTPACEEAGGWKDMKELADTMQKQGDLFGIHDQYRDYYFAAESFDEDYACRLTDGTIPTHKRWAGGQQSYLCATQAPHYVKRNFREIEKNQIHLDGAYLDVFTCNEGDECNNPRHRMTRRDCYDFRARCFDYLMSKGILPSSEEVSDWSARSLVFCHYAPYDFMLRKPGSPKHGVPVPLFNL

SEQ ID NO: 6 - protein, 861640 aa, Dorea longicatena (residues 574,429-861,640 of 861,640)
  misc_feature (294178)..(294225): Xaa can be any naturally occurring amino acid
  misc_feature (448755)..(448787): Xaa can be any naturally occurring amino acid
  misc_feature (492191)..(492242): Xaa can be any naturally occurring amino acid
  MISC_FEATURE (496529)..(496529): Selenocysteine
  MISC_FEATURE (500661)..(500661): Selenocysteine
  misc_feature (520680)..(520743): Xaa can be any naturally occurring amino acid
  MISC_FEATURE (532995)..(532995): Selenocysteine
  MISC_FEATURE (533543)..(533543): Selenocysteine
  misc_feature (586556)..(586616): Xaa can be any naturally occurring amino acid
  misc_feature (593447)..(593487): Xaa can be any naturally occurring amino acid
  misc_feature (633079)..(633129): Xaa can be any naturally occurring amino acid
  misc_feature (647602)..(647650): Xaa can be any naturally occurring amino acid
  misc_feature (676167)..(676194): Xaa can be any naturally occurring amino acid
  misc_feature (681343)..(681346): Xaa can be any naturally occurring amino acid
  misc_feature (686227)..(686260): Xaa can be any naturally occurring amino acid
  misc_feature (698382)..(698432): Xaa can be any naturally occurring amino acid
  misc_feature (700353)..(700356): Xaa can be any naturally occurring amino acid
  misc_feature (715366)..(715415): Xaa can be any naturally occurring amino acid
  misc_feature (728542)..(728598): Xaa can be any naturally occurring amino acid
  misc_feature (744213)..(744216): Xaa can be any naturally occurring amino acid
  misc_feature (818913)..(818916): Xaa can be any naturally occurring amino acid
  misc_feature (838815)..(838843): Xaa can be any naturally occurring amino acid
  misc_feature (839903)..(839955): Xaa can be any naturally occurring amino acid
  misc_feature (855487)..(855522): Xaa can be any naturally occurring amino acid
  misc_feature (860194)..(860197): Xaa can be any naturally occurring amino acid
  misc_feature (860446)..(860449): Xaa can be any naturally occurring amino acid
  misc_feature (860529)..(860582): Xaa can be any naturally occurring amino acid
VYHDCLIEPWMMEKIDDTEDYMLYALLNGGAPYLIRDGAYPNFDGSFDGNVKMHIEEDIKRCKVVTDLHKKVAKCEMVSHEMVDGNPQVQRTTFADGTKVTVDFEKQTYNIEVTKDEERAGMTYIKTKLKRSIDIDAIITLHYFEYMKNFEFKGESHNFWEFLYVDKGTVAVRADDTWTTLKTGDIIFHQPNEFHAIKSIGKDSPNLVVMSFTCDSPAMDFFIRRNFTLSMEERSMISQIITEARQTFSTPMHIPSVEQVELKDNTPFASQQMILLYLELFLITLIREHQPTGNVSSAMHKSSPEKESTEHERLSEILKFLEFHICEKLTVSDICDTFSISRSALQSLFHEQLDCGVIDHFNKMKIQKAKDIICDGSMNLTEIAYFLSYSSLPYFSKQFRIATGMSPSAYASSVKGITDALRNSKERERDTMERKNLWQTYSEAQIRELEEVNAQYRTCLDEGKTERECVKKTIELAEAEGYRNMKDLIKAGTKIHAGDKVYMDYMGKAIVLFQAGTAPVEEGMNILGAHIDSPRIDVKQNPLYENEGLAYLDTHYYGGVKKYQWLSIPLALHGVIVKKNGEKVEVCVGEKETDPVLVINDLLPHLGARQREKLAKDFIDGEQMDLLIGNRPEDKEENAVTRRIKNLLKERYDVEEEDFLSAELEIVPAGKARDCGLDNSMILAYGQDDRVCAFTSLFAILRAEEVARTSCCLLVDKEEIGSTGASGMTSRFFENAVAEYVLLNEGVEYNDIVLRRTLANSKMLSSDVSAGFDPMYEDVYEKRNAAFLARGPVFNKYTGSGGKSGSNDANPEYIAQLRQIMEEAGVNFQTAELGRVDVGGGGTIAYLMSVYGMEVIDSGVAVLGMHAPWETTSKADVYEAVRCYEAFLKAEFMAYHGVELQNSITIEKIFSIHYFEYMSNFSFAGESHNFWEFICVDKGEVGVTRGKSYTILKKGDLIFHKPNEFHDVKATGGIAPNLVVISFECNDDAMYFFNDRLLQIDETERNLLANIIIEARRCFDCRLDDPYLQNMPLKDPDTFGAQQMIKLYLEHFLIHLIRRYSNPIVLSKKLPKADSPKVTKSNSDAEIFGRIVDYLESHLTTHVTIDQICKDNLIGRSQLQKIFKEHCSLGIIEYFSMLKINAAKELIRTNRMNFTQIAEHLGYTSIHYFSRQFKKVAGMTPSEYASSIKAMAEGEFKTQPSLSHAIASLEKELGVKLFEKEGRNVALTKCGQAFLIDVEQALDMIDSSVNKLQMTGRGEGRIDIVELRALSSTVVPNFVKGFLDSTPDKKIDFYFHSSTGLTSDMIQGLKDRKYDIAFCSMMDNEPLIEFTPVAKQELVLIVPKGHPLEGRSSIDLKDTLAYPHIAFSKRSGLRHVIDKLFKKCGGYPQIAYSMEEDQGVAGLVGAGFGIAVVPKMPVLSYMPVSIIEIEKPSWERLFYMATLKNVYQAPVIMDFKKYVTEHADLMAKVSVIGAGSWGTALALLLYKNGHDVTVWSYQEEEVRMLSEKREHVSKLPGVKIPEGIFFTADIKEAVEEKDVVVLAVPSIHVRNTAKKINPYVKDGQILVDVAKGIEEDTLMTLSQQIEEEIPQADVAVLSGPSHAEEVGRGLPTTVCIGAHTEATAKYLQQLFMNEVFRVYISPDILGIELGGSLKNVIALAAGVADGMGYGDNTKAALITRGIAEISRLGVKMGGAAETFGGLAGIGDLIVTCASVHSRNRKAGYLMGQGKTMKEAMDEVKMVVEGVYSAKAAAKLGKKYNVSLPIIEEVNKVLFEDKSPKEAVNELMLRVGKAEHTALPWEMERLICVLVGYVFGLIQTGYLYGKKNGVDLRKKGSGNAGTTNALRTMGWKAGGVTLLGDCFKCVAAVVVVHMIYGKTHTDMMPLLSMYAGMGVVLGHNYPFYLKFKGGKGIAATAGLIISTTNIWIVLICLAAFIAIVATTRYVSLGSMTVVTIYLISVIVYGQHGGFHVENVAYLHEMYGIATFLMILAFWRHRANIKRLLSGTENKISVGGKDKKMSKPVVAIVGRPNVGKSTLFNVLAGEMISIVKDTPGVTRDRIYADVTWLDKEFTMIDTGGIEPESKDIILSQMREQAQIAIDTADVIIFITDVRQGLVDADSKVADMLRRSGKPVVLAVNKVDNFDKFMPDVYEFYNLGIGDPVPVSAASRLGIGDMLDAVIAHFPEHEAEEKEDERPRVAIVGKPNVGKSSIINKLTGKQRVIVSDVAGTTRDAIDTNVKYNGKDYVFIDTAGLRRKSKIKEELERYSIIRTVTAVERADVVLVVIDATEGVTEQDAKIAGIAHERGKGIIIVVNKWDAIEKNDKTMREYENNVRRVLSFMPYAEIMYVSAETGQRLNKLYDMIDMVIENQTLRVATGVLNEIMTEAVAMQQPPSDKGKRLKLYYITQVAVKPPSFVIFVNNKELMHFSYTRYLENKIREAFGFRGTALKFFIRERKEKDQMPNIKLMESGLPVAPLKIGALESCRELGEKVNDYIVQFRKSTMDKNTDSPLYYNYMRDNYLIDCPCPRFGSGEAKGLLTESIRGADLFLMVDVCNHSLTYSVNGHLNHMSPDDHFQDLKRIIAAANGKARRVNVVMPFLYESRQHKRTKRESLDSALALQELIDMGVSNIFTFDAHDPRVQNSIPLHGFDSFNPPYQFMKALLKAEPDLKVDKEHLMIISPDEGAMQRAVYFSNVLGVNMGMFYKRRDYSTVVNGKNPIVAHEFLGEHLDGKDAIIIDDMISSGESMLDVAKQIKDRGANRVFVCTTFGLFTDGFEKFDEYYEKGYIDRVITTNLTYLPAEAKEKPYFLIADMSKFIALIIDSMNHDISIGKVMDPTEKIHRLLEKHNGTLMKSGGILGMDNTEIRRRRRNRRRVRNIRVGLALFTICIVAIAIPVVRGILRKPAQITIQVADVEIKQGEQLPAYSADIKIRDKDRNKLTKDYTAEDFAKDLKKGKNITFLSKADANTEGTYVIIAKLNSNIKKNLEGDWKKKVQVTIKNGTCKVKNPTGVWEGNKFKKYDGTYITSDFVVSKGNTYYFDSDGKKVTGWQMIEGALYCFDNKGIMQRSGWVAKDDGKAYLTDEGKALTGWQTINEKEYYFDSKGIVATGEVKIGLEKCKFNEKGELISKEKVAIDPKKPMIALTFDDGPGPRTSELLNQLKKYNAHATFFMLGKNVKLYPDAVKQMLKDGNELGNHSYDHQQLTKIDGAAVKKEVDDTNRNIKNICGSPATLLRPPYGAINDTVKSNVGMPMILWNVDTLDWKTRNTQSTIDSVMKNLKDGDIVLMHDIHSQTIDAALELIPKLEEEGYQLVTVSEMAAAKKQDLKDGTAYSDFTNMYKYHNLNPISQVGLDEFTKDYAPVSTPETADAILVRSAAMHEMEFAPDLKAIARAGAGVNNIPLEKCAEQGIVVFNTPGANANGVKELVIAGMLLASRDIIGGINWVQENEEDGNIAKDAEKAKKAFAGQELEGKKLGVIGLGAIGVLVANAATHLGMDVYGYDPYVSVDSAWRLSRSIHHTTNVDEIYENCDYITVHVPALDSTKGMIGKDALGLMKEGVIVLNFARDVLVDSEAMVDALVAGKVKHYVTDFPTPEIAGVKGAIVIPHLGASTEESEDNCAKMAVKEVMDYLENGNIKHSVNYPDCDMGLRGDKTRILVLHHNVPNMIGQISAILAKDNMNIADLTNKSKGKYAYTMIDVDSEVPDGVVEELKQIGEVLRVRVICMSRVYNFSAGPAVLPEEVLKEAAAEMLDYQGCGMSVMEMSHRSSVFQEIIETAEADIRELMHIPDNYKVLFLQGGASQQFAMIPMNLMKNKVADYIVTGQWAKKAAKEAEKYGEVHVIASSEDKTFSYIPDCSDLDISEDADYVYICENNTIYGTKFKELPNTKGKTLVADVSSCFLSEPVDVSKYGVIYGGVQKNVGPAGVVIAIIREDLITDDVLEGTPTMLKYKTHADAKSLYNTPPAYGIYICGKVFKWLKKQGGLEAIKERNEKKAKILYDYLDESKLFKGTVVPKDRSLMNVPFVTGDKDLDAKFVKEAKKAGFENLKGHRSVGGMRASIYNAMPIEGVEKLVEFMKAFEKENLMQLTGSQIVIECLKEQGVDTVFGYPGGAILNVYDELYKHKDEITHILTSHEQGAAHAADGYARATGKVGVCLATSGPGATNLVTGIATAYMDSIPVVAITCNVGVSLLGKDSFQEIDIAGVTMPITKHNYIVKDVDNLADTIRKAFVIAKEGRPGPVLIDIPKDVTANKAEFTAQEPKVVKPSEDICEKDLESAVRMIRESEKPYIFVGGGAVLSGASKELYEFVKKVDAPVTDSLMGKGAFPGTDPLYTGMLGMHGTKASNYGVSECDLLIVAGARFSDRVTGNAKKFAQNAKILQFDVDAAEMNKNILITEGVVGDLKVVLQKMNERLEQQDHKAWVEQIMSYKEKYPMTYHPDVLSGPFVVEEIYRQTNGEAIISTEVGQHQMWAAQYYKYTEPRTLLTSGGLGTMGYGLGASLGAKVGRPEKTVVNIAGDGCFRMNMNEIATAARHNIPVIQVVINNHVLGMVRQWQNLFYGQRYSATVLNDAVDFVKLAEAMGAEGVRVATQEEFKEAFANALKSGHPVVIDCQIDSDDKVWPMVAPGAPINEAFDEKDLEAKNAEMRSDTVTKGKQQAPHRSLFNALGLTEEEMNRPLVGIVCSYNEIVPGHMNLDKIANAVKQGVAMAGGTPIMFPAIAVCDGIAMGHIGMKYSLVTRDLIADSTEAMAMAHQFDALVMIPNCDKNVPGLLMAAARINVPTVFVSGGPMLAGHVKGQKRSLSSMFEAVGANVAGTMSDADLCEFENKVCPTCGSCSGMYTANSMNCLTEVLGMGLRGNGTIPAVYSERIRLAKHAGMKVMELLEKNIRPRDIMTKEAILNALTVDMALGCSTNSMLHLPAIAHEVGMDFEIDFANGISEKTPNLCHLAPAGPTYMEDLNEAGGVYAVMAELNKKGLLHTECMTVTGKTVGENIEGVVNKDPEVIRPIDNPYTPTGGLAVLKGNLAPDGSVVKRSAVVDEMLVHEGPARVFDCEEDAIAAIKGGKIVAGDVVVIRYEGPKGGPGMREMLNPTSAIAGMGLGSSVALITDGRFSGASRGASIGHVSPEAAVGGPIALVEEGDLIQIDIPNLSIHLDVSDEELAKRKANWTPREPKVTTGYLARYAAMVTSGNRGAILEVPKAKMNLKIGVIKGDGIGPEIVTEAMKVLNKVAEVYGHTCDYTQLLMGGASIDVHGVPLTDETIAEAKACDAVLMGSIGGDAKTSPWYKLEPSKRPEAGLLKIRKALNLFANLRPAVLYDELKGACPLKEEITEGGFDMMIMRELTGGLYFGERKTEEVNGVMTAQDSLTYNEEEIRRIAKRGFDIAMKRRKKVTSVDKANVLDSSRLWRKVVEEVSKDYPEVTVENMLVDNCAMQLVKDPKQFDVILTENMFGDILSDEASMVTGSIGMLASASLNETKFGLYEPSGGSAPDIAGKGIANPIATILSAAMMLRFSFDLDKEADAIEAAVSKVLKDGCRTIDIMSDGKTQIGTEEMGSLIAANIQMASSLYHAIVKSFRLSKRLQECIEWIEINKVYKKYDKKSFLVCKMMTKGYIHSLESFGSVDGPGVRYLIFTTGCAMRCQFCHNPDTWNMNSGTLYTADELIDKAWKYRTYWGSKGGITVSGGEPLLQIDFLLELFQKAKERGINTTLDTCGNPFTREEPFFSKFQELMKVTDLVMLDIKHIDDEQHKILTGQTNKNILDMARYLSDTGKPVWIRHVLVPERSDKDEYLHRLHDFIETLDNVEKVEVLPYHTLGVYKWKELGIPYQLEGIDPPSKERVENANRILETAKYHAMAHFEQWAGFKGKEWVNSVDVRSFIQENYTPYEGDESFLEGPTEATDTLWGKLQELQKEERAKGGVLDMETEVVSGLTAYGPGYISEETKDLEKVVGLQTDKPLKRAFMPYGGIKMAEQACTTYGYQPSEELHKIFTKYHKTHNQGVFDIYTPEMKKARHNKIITGLPDTYGRGRIVGDYRRVALYGIDFLIEKKQYDFERYARHGMKGTDFRLREELADQIKALKEMKEMAAVYGYDISQPAKDAHEAVQWLYFGYLAAIKTQNGAAMSVGRISTFLDIYIERDLKAGKITEKEAQELIDHMVMKFRMVKFARIPSYNELFSGDPTWATLEVGGLGQDGRSMVTKNDYRFLHTLKNMGPSPEPNLTVLYSSRLPENFKKFAALISVETSSIQYENDDVMRPVWGDDYSICCCVSATETGKEMQFFGARANLAKCLLYAINGGIDEKNKVQVGPAYRPITSEYLDFDEVMEKYDAMMEWLSKLYVDTLNMIHYMHDKYYYEAAQMSLIDTDVKRSFATGIAGFSHVVDSLCAIKYAKVKAIRDEDGITTDFEIEGDFPRYGNDDDRADDMAIWLLKTFMHKLNKCHTYRNSVPTTSILTITSNVVYGKATGSLPDGRKAGEPLSPGANPSYGAEKSGLLASLNSVAKLPYELALDGISNTQTISPSALGHTDDERKENLARVMDGYFDQGAHHLNVNVFGTDKLVDAMEHPEKPEYANFTIRVSGYAVKFIDLTREQQLDVIARTCHDHMMFSLAAQSSSGTSWVILIVVYAVIFGGFYMIFMRPQKKEQKRVQAMINEMEVGDTVLTTSGFYGVLIDISDEDVIVEFGSNKNCRIPMQKAAIAQVEKASAEMYELIKKDGLAKRGRLHTVHGVIETPVFMNVGTAAAIKGAVATTDLQEIKTQVELSNTYHLHVRPGDEVVKKLGGLHKFMNWDKPILTDSGGFQVFSLAGLRRIKEEGVYFNSHIDGHKIFMGPEESMRIQSNLASTIAMAFDECPSSVADREYIEKSVARTTRWLVRCKKEMERLNSLPDTINKHQMLFGINQGGVYEDIRIKHADEISKLNLDGYAVGGLAVGESHEEMYRILDAVVPHLPDHKPTYLMGVGTPVNILEAVDRGVDFFDCVYPSRNGRHGHVYTNHGKLNLFNAKFELDDRPIEEGCQCPACRNYSRAYIRHLLKAKEMLGMRLCVLHNLYFYNTMMEEIRDAIDHDCYKEYKERKIAAVTGKNEMSIREKHTDKMEEILEKEMYADEGFSEIDEEDQRPETQKVMKQERRQQRKNRRKNWKLRNKIAIVLSLIVSVIAIGYVGTAVFYSTHFFSKTVINGIDCSNKNVKQVEEYLEKEVADYKLTLLEADNKTEVIEGKDISLKYVPGKQVEKLIKGQNPFLWIESLWKGRNMKAKIGVEYDESALKTQIANLECMKEENQIAPVNAHPEFKTDKFVVVPETDGTTIKTEEFRKTVITAVNGANEKLDLLKTGCYEKPAYTSDSKKVTEACDAMNKYLGATVTYDFKPNTEVVDSSMISKWVKVDDDMNVTFDESAVKEYVQSLAAKYDTKGKERTFTSASGNTVTVSGGSYGWKIDQEAEYNALIANIQKAETVTREPNYSSRAASHDGNDVGNTYAEVNLTTQHMYYVKDGHIALETDVVTGNPNKGNATPTGVYSLAYKAKDQTLKGTKKADGTYEYETPVKYWMPFNGGVGFHDASWQPTFGGSRYQTNGSHGCVNMPPEMAGKLFELISAGTPVVVHNMAGSTFGTLFRITTWGESHGPALGVVVDGCPAGIPLTTDYIQAFLDRRKPGQSKFTTARRESDTVEILSGVFEGYTTGTPISLVVRNNDQRSHDYSNIKDCYRPGHADYTFDKKYGLRDYRGGGRTSGRETIGRVSGGAVASRILECLGIKLTTYTKAIGPVSIPSDAYDYSVINENRLYMPNSEYAQQAAAYLEQCISDQDSSGGLIECIIEGMPAGVGEPVFDKLDASLAKAVMSIGAVKGVEIGDGFSVTSSKGSINNDSFISENGQVLKQTNHSGGILGGISDGSSIILRAAIKPTPSISQPQKTVNTAGENIEIAISGRHDPVIVPRAVVVVESMAAITLTDLLMQNMTSRIEYLKNIYLMNEVFYTVQVGDCDRKFREGTTYLDIAKEYQHEYEHDIVLVFVDGRLQELFKTLKKDCKLEFVTTADSLGYKAYRRSMSLMLVKAVYDVAEHKNIDKVRIHYSVSKGYYCTIEGNIELTQEFLDKVERRMRTMVEKNLPIQKKSVHTDDAIAMFGEHGMHDKERLFHYRRVSRVNIYSMNEFEDYYYGYMVPSAGYLKYFKLYLYDEGFVIQMPTQGEPEKVPPFEPQNQLFHVLQESTKWGDAQGIETVGDLNDKITRSDVNELVLVQEALQEEKIAQIAEQVRVRSDVRFVLIAGPSSSSKTTFSHRLSVQLRANGLCPYPIAVDNYFKEREETPKDENGNYDFEGLGAVDVELFNRQLQELLDGKEVVIPEFNFVTGHKEYKGRPKKLKENEVLVIEGIHCLNPELTRNLPDENKFKIYISALTQLNIDEHNRIPTTDGRLIRRIVRDARTRGTSAKETIRMWPSVRKGEECNIFPYQEEADVMFNSALIYELAVLKPYVEAQLFGIERECPEYLEAKRLLKFLDYFVGIGSENVPANSLLREFIGGGCFHVMLCKDVMYEIEKEYPLNYALSWDNVGLLVGRDDKEVKRIYIALDATDEVIDEAVRTGADMLITHHPMIFSPIKRIHNLDFVGERILKLIQNDISYYAMHTNYDVLGMADLSGDKMNMKNAEILEVTAEGDIGKEDEPEGIGRVSDLETPMTLRECCEDVKSAFHLGAVKVFGNLEEKVKRIAICPGSGKSVIQAALDKNADVLITGDIGHHEGIDAVAQGLAIIDGGHYGIEHIFIEDMRQYLEKHLSEVEIVAAPISHPFLIVMELSKRLQAVADLVTEGASVADVGTDHGYIPIYLIEHNIAGKVIALDINRGPLERARMHVVGHGLKGKIETRLSDGLEKVLPGEVDTMIAAGMGGGLVIKILTEGYPVVESLDTMILQPQSEIGKVRRFLNEHNLQITEENMVEEDGKFYPMMKVIHGKKEEYTICEYTYGKRLLLEQHPVLKKYLDREMQIKESVFQQLFKHQNSASAAERMEELKQEIILTQEALKYYEMDENIVKFQEKLRELVSLGKKKKGILEIQEINDFFSDMELDSDQMEKVFDYLEANNVDVLRISNDDDDIPDEIVMSDEDDIDVEKIDLSVPDGISIEDPVRMYLKEIGKVPLLSAEEEVELAKRMADGDEEAKKRLAEANLRLVVSIAKRYVGRGMLFLDLIQEGNLGLIKAVEKFDYHKGFKFSTYATWWIRQAITRAIADQARTIRIPVHMVETINKLIRVSRQLLQELGREPAPEEIAAELDMPVERVREILKISQEPVSLETPIGEEEDSHLGDFIQDDNVPVPAEAAAQTLLKEQLDEVLDTLTEREQKVLRLRFGMNDGRARTLEEVGKEFDVTRERIRQIEAKALRKLRHPSRSRKLRDYLDMYYSDEIIEEVRSRNDIVDVISTYVKLQKKGSSYFGLCPFHNEKSPSFSVSRQKQMYYCFGCGAGGNVFTFLMEYENYTFVEALKYLADRAGVELPEEEYSREAKERADTRAILLEINKAAAQYYYIQLKSSRGAVGLEYFKKRKLSDETIKAFGLGYSNKYSDDLYRYLKSKGYKDDMIAKAGLISIDEKNGVYDKFWNRVMFPIMDVNSRVIGFGGRVMGDAKPKYLNSPETMIFDKSRNLYGLNRARRTKKPYFLLCEGYMDVISLHQAGFTNAVASLGTALTPGHAALIHRYVQEVYLTYDSDGAGTRAALRAMPILRDAGITAKIIRMEPYKDPDEFIKNLGAEAFEERIASARNVFMYSLEVLEKDYDMNSPEGKTEFMKETARRLTQFEEEIERNNYIEAVAKAYHVGFEELRKLVGKMAVQTGLAKPAERPREIQNNRKNKKEDGILVSQKVLLTWLIESEEIFHQIEKYITPEDFSEGLFRKVAELLYEQYEKHEANPAQIMNHFTDEEEHREVAGLFHTKIKELTTVKEQEKALQETILRVKEHSIEEATKNLDPTDIQGLQRLMNEKRKMQDLRTLHISINMKALQHLQTINHHKYLVMKECFEVGLYKQGLLHDMSKYSPTEFLVGCKYYQGNRSPNNAEREATGYSRAWLHHKGRNKHHYEYWIDYSVTPGEGMVGLKMPLRYVVEMFMDRIAASKTYQGEAYRNWHPLEYYEKGAARLGKMIHPDTAKLLHELLEMLAEEGEEKTFSYIKHVLLKQKKYMREVQGYPLPLGVQISENKINFSIAVPTEKKCQLLIYRAGRKRLYRQFEMETAVGEVRCIALTDIEPAEYEYNYLIDGEVVVDPYVQALAGREHWGVKKETARHEIRGRFLSQEYDWEGDHTLQIPYHQVIAYSLHVRGFTRHASSKVKSKGTFQGIIEKIDYLTDLGINQIHCMPVYEFEECQTYRNYWGYGEGFYFAPKSAYSSDGDGARGLKDMVKACHKAGIEVVLEMPFCTGADKMMMLECLRYYVMEYHIDGFILNPLVIPIESVHADPVLKKTKIMEHELGFQTVMRRFLKGDEGMIPDVIYWLKHHSEKQGIFNCITDQNGFTLNDLVSYDSKHNEENGEKNQDGPDYNYSWNCGAEGPSRKKAVTELRKHQIYNAFFLLLLSQGTPCILAGDEFGNTQKGNNNVYCQDNSVGWTDWRGLEKKKTLHDFVKKLILFRKEHDLLTPERELQGIDLSCCGVPDVSYHGEEAWQVPKEVSSRQLGVYYSGARTKNADCYVAYNMHWLEHVFALPALPKGYGWYVRATTDRGILDYPELLKDQRKAELKERSIVVFTADRIVEVETKKNESITTLTDDQSSMMKKRMLGVIAVLLVCIFALSACKKEAGKPVDNAVSEDTTDDSEDTDQTDDAGKYKFGFSVIDMQNPYFITLEEAVQQVVDKEECTMVVKDPSSNADTQAEQIQEMIDEGINAIFLCPVDWEKITPSLQALQEAGVKIINIDSQVKDTDYIDAYVGSNNSEAGKLCGNDLIEKYPDGGTVAILEATKQNSINDRITGFEQTIAKAEKGFEVVAREDTNGTFDSALEAAKKILNEQPDITAIMCGNDQMAVAAKTALNLAGNDQTVVYSIDGSPDIKKELKKADGQIAGTVAQSPVNIGKKAVDIALDILEGKDFEKETSVDVFMINKENVEMYGADGWQMSDTKETEGYTTVELTLDNDEVIECAILTVYEAAGKEYIALLPLDENLEPNEAGDVYLYQYNETEDGEPDLGNIEDDEEYEIAADAFDEWMDSQEFDESDIEEMSLNHAQTEAVAHNKGPCMVLAGPGSGKTLTIAKRIEYLIMKHKVRPEEILVITFTKYAAWEMKNRTRSICGPSSYAVTFGTFHGIYYGILKWAYRLNQSNLLSDEEKYRILREILPGIDWDQEPEADEEKDYLQELAIEIGNVKNNCMDIEEYEPVKYTTEKFRKLYRTYEETKKKYRKIDFEDMLIQCRDLFMKRPDILKKWQEKFQYILVDEFQDVNQAQYDVVRMLAAPQDNLFVVGDDDQSVYGFRGAKPGIMMEFMKDYPKARQILLDVNYRSSGYIVKGALRVIGNNKIRFEKKIEAFRKPDETVHVQEVKDPVQEAEYVLERIREYREKGVSYTEMAVLYRTNVDARAMSELMTEYQIPFVMKEHLNNIYEHFIALDMISYLRLSQGEYDRKYFLQIANRPNRYLTRESMKTGNVSYESLRRYYRDKDWMVDRIDQLEWDMKMICDKTPYAAIQYIRKRMGYDEFLKEYAAYRKISSEDLFAVLEEIWQNSKGYGTIKEWFEHIESYGKMLKEQNKKNGEKEGVNLMTMHAAKGLEFDTVFVIEANEGSCPYKKATTDEEIEEERRLFYVAMTRAKRKLVISYVKEKNGKDLLPSRFVSELLLNVMPTEGTTTFHDEIYGDITVPNEELDDLILIKSDGYPTYNFANVVDDHLMGITHVVRGNEYLSSAPKYNKIYEAFGWDVPVYVHCPLITDENHKKLSKRCGHSSYEDLIEQGFVTEAVVNYVALLGWSPEGNQEIFSLEELVKAFDFHRMNKSPAVFDLGKLKWMNGEYIKAMDFDKFYERAEKYVRDVITKDYDLKKIAALVKSRIEIFPDIEEQIDFFEAVPEYDTAMYCHKKMKTNEENSLEVLKEVLPLLEAQEDYSNDALFALLKKYVDEKGVKVGYVMWPIRTAVSGKQSTPGGATEIMEILGKEESVKRIKDGIELLSKMNQSXXXXXXXXXXXXXXXXXXXXXXXXXXXXXXXXXXXXXXXXXXXXXXXXXXXXXXXXXXXXXNKYTTLFLSFLHAFFLMVIKIVANLACSFIGTIAYAVMFQVPRRFYIGCGITGSVGWMIYKLASVYCSVAVASFIGTVCTVLVARMLTVRLKCPITIFLISGIITLVPGAGIYFTAYYLVTNQLAMAAVKGLGAVKVAFAIVLGIVCIVSIPREVFQKEYWIERKLKKQQKGKIMNIRQVTDGKEDYIELLRAGDPDESRIRKLLEKGELFLLEEHGKLRTLCIVIFSEEKKCEIKNIVTIKKDQGKGYGRYMIHYICEHYCAQYDWVYMKKERCLDIMEFCEKCGFSDEDEKYLKKELMSEIDTKRVINLAMEAGRMLLKNGGEIFRVEETMMRICHRFGVKYVDLFTLSHGLFICAGTDKEKLYTKVKQVPLSSTHLGIVAEVNDLSREIAAGHVGIEEAWKKLKQINKMPTKRISYQIAAAGLSAGGLGYLLGGTPMEAFVAIFVGCVVFAWSLFAGKHGISKILVHIVGGIIIASMALAAMQIPAFGNLRMEGIVTGGIMPLVPGLAFVNAIRDLADSDYLAGTVKMIDAVMVFVYIAIGVGAALTVYHHVLGGVLMGMNIQKSAGVKADTFILKRNNMDRWIRMDVAMLIILAICTRLVAGIMNVEKMDAYTGSGEGFCKAVSESHGVDMVKDCFELGTQKVLDVKKTAKSVCKSVTIKKTMQDVIRPTETEEIIPEVKGVPEAKDGKAAWANMDSAKTETITQETVTDKSVPESITGKITEEPAGEPMTEDLLNLEGFKVNSEGVIEGYENLDLILCDGMIIFPADERCSGIGEHALDGISDAVEVYIPANITFVAPGVLEKIGGLMYIEVAPDNPVYESRDGMLYNKGGELISRPNGRMSNDRYTSPLSERYASKEMQYIFSPDKKFRTWRKLWIALAETEKELGLDITDEQIEELKAHADDINYDVAKEREKVVRHDVMSHVYAYGKQCPKAKGIIHLGATSCYVGDNTDIILMSEALEIVRKKLINVIAELAKFADEHKNLPTLAFTHFQPAQPTTVGKRATLWMQEFMMDLEDLEYVKGSLKLLGSKGTTGTQASFLELFDGDQETIDKIDPMIAKKMGFETCYPVSGQTYSRKVDTRVVNVLAGIAASAHKMSNDIRLLQHLKEIEEPFEKTQIGSSAMAYKRNPMRSERIASLSRYVMVDAMNPAITSATQWFERTLDDSANKRLSVPEGFLAIDGILDLCLNVVDGLVVYPKVIEKRLMSELPFMATENIMMDAVKAGGDRQELHERIRELSMEAGRNVKEKGLDNNLLELIAADPAFNLSLEELQKTMDPAKYVGRAPVQVEAYLNNVVNPMLEANKEILGVTAEINVMSEFEKVTTGLGEECGVFGAYDMDGGDVAPSVYYGLFALQHRGQESCGIAVTDTYGERKVHSKKGLGLVNEVFDEESLQKLKGNLGVGHVRYSTAGGSRAENAMPLVINYVKGILAIAHNGNLTNAIELRHELEYTGAIFQTTIDSEVIAYHIARERLNVKKAEDAVKNAMKKIKGAYALVVTSPRKLIGARDPFGLKPLCIGKRDNTYFLASESCAIAAVGGEFVRDVEPGEIVSFTKHGMKSDKSMAIDPKKQARCIFEYIYFARMDSVIDNVNVYHARIVAGKALAESYPVDADLVVGVPDSGLVAAKGYSEQSGIPYGMAFHKNSYVGRTFIKPKQSQRESSVKIKLNVIEEVVKGKRIVMVDDSIVRGTTCANIIKMLKKAGAKEVHVRISSPPFLHPCYFGTDVPSNEQLIAHSHTTEQIREMIGADSLGYMEVEKLKDMVGDLAFCDACFTGNYPMEVPGRDISLAFEMYRYEYKAGGNIAFPSALYYTNIAKCFLKTVLTNEKFEKNGVCIYEMSLLEMKNIKKSFNGVEVLKDISLKVEKGEVLGIIGPSGSGKSTLLRCATGLETADAGEIHYEGTFGLVFQNFNLFPHYSVMKNITDAPIKVQKRKKEEVYKEARELLKKMGLSDKENAYPCQLSGGQQQRVSIARALALNPDILFFDEPTSALDPELTAEILKVIRELAMEHMTMVIVTHEMNFARNVSDHVIFMDGGVIAVEGTPEEVFDSSNERMKEFLGKFNDMEIGTLIRELGGGMWISAEIFILTLLFSLPLGLVVAFGRMSKIAPVRWISKLYISIMRGTPLMLQLMVVYFGPYYLFGMRISTGYRMTAVLIGFAINYAAYFAEIYRGGIEAIPVGQYEAAKVLGYSKGQTFFRIVFPQVCKHILPAVTNEIITLVKDTSLAFVLAVTEMFTMAKQIAAAQTSMVPYIAAGIFYYVFNLLVAMIMEKIEEKLNYYHDSKDAELNSGTIDCIWNGFTMNGREDDYTWSDPYIDNKQVVVVRSDSGIDDFAGLKGKHVEVQTDSSALAALEGDQKDLAATFADLNQVAEYNTAFMDLESGACDAIAMDIGVANYQVNSRKNPDDYKILDKEISSEQYAVGFKKGNTELKDKVQKTLDEMAEDGTVDKIAEKYADYGVPGALCIGKNGKMAIYHMQAKVVSRGSGRSAVAASAYMSCSRMYNDYDGIQHDYTRKQGLIYQEVMLPPMAPLEWNDREQLWNAVEENEKTKDSRLAREFVVALPVELDKGSNISLLQDFIKKNFVDMGMCADFAIHDTDGHNPHAHILLTVRPLNENGTWQYKTEKEYLCIKDGEEKGFTASEFKTAQKQGWEKQYRYKVGKKKEYLTMADKKIMTPEEKALLQARHRQEEAEARNRKKERDARTHRLVQEGAILESIVPHIKEMDLDSLKRELMIRLRGMMAALSRENKELKRKNEKLQKALRKQDLNFIKSLMEYFNMVLSALGGGTAVAVATILFLKNKIEKLIDKKIDYYFESKLENKKGIIEQKVYVSQHKFDKEYEIIQELMEKAFNFTYLTWNVYSTIGYSDKDDSSVENVEKYTKECDEFTLFYMRNCAFITEDLAKTFDLFVKKINDFRVAAVKYKNLLSEASGKENEILLTLSNKMRTIHDEINTKSEYSHDKLVEITRKHYEKLDIKMEIRILGRDLEVSEIGFGCMGMSHAYGTVSTQKEAEELIEKAIDEGCTFFDTAEIYGTTEDPHHNEKLLGKVLRPYRNKIVLASKCGIRFDETATTVNKPLIPDGRPETIKASIEGSLMRLNTDHLDLYYIHRIDMTVPIEETAGAMKELMEQGKITHWGLSEASEEIIRRAHKVCPVTAIQNRYSMMYRDYEKLFPVLEELKIGFVAFSPLANGLLTAAYHSHGEFEKPGDYRSAMPQFTEEGLKENNEFMSWMKVIAEEKNATPAQISLAWMLAKKPYIVPIPGTRKVNRLEENMESADIKLTQDEVKSIDEMLAHMPMSQVFGGSKIQKKMKTRKKITIGVIVAFLAVVMVGYIYLFTGVKISKGEMKKMLVVYYSWSNGNTKRIAEQLTNGTGADIARIETTEPYSGSHEDVVEQGKREVEAGFMPQINPISVNLADYDVIAIGTPTWWYTMAPAVLTFLTTNDFTGKTVIPFMTNGGWPGHVIKDMEENCKGAAFAHEMQIQFDSKGKDHLETSEEVITEWIGQINTDINKMRKNFGAKPFLYPQPVMILGTYDENGKANAMNAAWGGIVGANEIIVDLSAHKTTDNIIKNKAFTVGVADLEHLVACDYVGIVSANKEADKMKKAGFTTTKGEFVNAPIINELPLTLECELVKVIDGSKYLAEIKNVSADEKYLGDDGEIDLSKFTPITYDPVHHGYYRLGERVGNAFTDGAKLKMKKIVQTAGRNALNEFAPQFAHFNDDVLFGENWNNQDIDVKTRCIITVTALIASGMINTSLVHHFENAKAHGVTQKEIAAVITHIAFYAGWPKGWAAFNLAKDVWSIDEGDLSYEDEAMRAHAKKMIFPIGEPNDKFAQYFTGKSFLAPVSTSQVGIFNVTFEPGCRNNWHIHHAKSGGGQILICIAGRGYYQEEGKEAVEMKPGDCVNIPAEVKHWHGAAPDEWFSHLAIEVPGEKTSSEWCEIVTDEIYGKLKIYLMTANLPQAKTHFKRAFKIYEKIWTDEPEMIEAKYQEIQELYPQVGFFLGQQLSDFLTKQTGFREYLLRKEQPVRFLYESELYEITIKDVKLFPQGYSALALHPEYLKNEPSVLLVDIGGWTVDLMRLDNAVMKKNKYEIDMCNGTIMDKLISFSIPLMLSGILQLMFNAVDIVVVGRFSGSQALAAVGSTTALINVFTNLFIGISLGANVLAARYYAAGKTKEMSETVHTAIALALVSGVAMAVIGVVFARGALEIMGTPDDVIAKSTLYMRIYFCGMPFFMMYNYGAAILRAVGDTKRPLIFLIVSGVINAVLNLFLVIVFHLDVAGVGIATVISQLVSCILVLRCLHHTESSYQLHLAKLRIRSVYLKQIFEVGVPAGIQSTVINISNAMLQSSVNSFGSIAMAGYTASNNIFGFLYVSVNSFTQACMSFTSQNYGVKKLKRMDRVLIDCMILSVVVTLILGSSVYIFGPELLHIYSNQADVIKYGMEIFSYTTVTYFLCGLMDLFPGALRGMGYSTVPMILSIIGTVGVRIIWIYGLFPSHRSLTFLFLSYPVSWIATIIMQVICFWFVRKKIHRTMVIAAEMCKDIFLDRTSKTTYNHLAYMFSFTFIVNIHISKYKKGEYVMNIQLSEHFTYKKLLRFILPSIIMMVFTSIYSVVDGIFVSNFVGKSAFASVNLIMPYLMGISALGFMIGTGGSAFVSKTLGEGKKELANQYFSMLVTIAAIGGFVLSVLSFIFMRRIVMAFGAAGDLIDYCTLYGRISCISLTAFMLQNVFQSFFVAAGKPQLGLKVIVAAGCTNIVLDALFIGVLHFGIAGAAFATMTSEFIGGLLPVVYFFRKNDSLLHFVKPVFDRRVFLKTCTNGSSELMTNLSMSLVNALYNLQLMKIAGENGVAAYGAVMYVNFIFVATFLGYAIGCAPVISYHYGAGNHAELKNLYKKSMSIILVWGVILFGAAQLLAPVLSKIFVGYNTGLYAMTLHGFRVYAIAFLIIGINIFGSSFFTALNNGLISAVISFLRTLVFQVIMVLTLPLWFGINGIWSAISIAEALTLIMTTTFFVRQKDKYHYLMGETQKKEKKKIGLTTKIFIALLAGAVFGIILCYAVPSGHIKDDIIVEGVLYVVGQGFIKLMKMLVVPLVFCSLVCGSMSIGDTKKLGTVGARTLIFYLATTALAVTVALSVGNLINPGVGLDMSTIKTNAASVETMKATSLTDTLLNIIPDNPINSLASGEMLQIIVFALIIGVILAKLGERAETVANFFSQFNDIMMEMTMMIMALAPIGVFCLISRTFANIGFSAFVPLAKYMIGVLIALAIQCFGVYQILLKIFTGLNPLKFIKKFFPVMAFAFSTATSNATIPLSIDTLTKKVGVSKKISSFTIPLGATINMDGTSIMQGVAVVFAAQAFGIHLSMTDYITVIGTATLASIGTAGVPSVGLVTLTMVFNSVGLPVEAIGLIMGIDRILDMTRTAVNITGDAVCTTIVAHQNKALDKNVFYAEENMLKLWIVGASGQIGSAINEVLDPLEMEVFNTDKEELDITDTDEVLNFGVINRPDVIINCAAVTDTDLCEKEPELAYRVNALGARNLSIVARKTGAKMVQISTDDVFDGIRHTPYTEFDDTNPKTVYGRSKRAGENYVKEFTHKHFILRSNWVYGNGNNFVNRVLHAADTKDELLIASDQFGSPTSAKDLARIILYLIKTNEYGTYHATCQGVCNRYEFAQEVLKLAGKRITLRPVVTSESDLSSARPAYAVLDNFILRIINVYEMPDWRASLKEYMDERMEDMNEAEKRRRELLEQTRYSYQESGIPAIHPRYRASYSELYGEEEAEQGSLGIRTFICMILFAVFVFMQNEGKDILHISSTKVVQEVSKNADITDVWKKIPMSYKRLIPCIFIKDGKAVRWIDDPTVVSKDVIELAKYYSDHGADELIVLDLSDSDEEHDETITLMKRINRVIRIPMIAGGNIRRQEDIKKILYTGAKRAMLNFSKPDSVKLIEDAAKRFGKEKLAVSLNDFDALFKHQHLIQDYSSEIVFMHRLDLNSIMNVTDVPCVIITDTEEESELFKILKCPGVRGLSGRYVSRTDIDCVAFKDKCTEEGIKMTSFESMMEFSQFKTNDQGLIPVIVQHYKTQEILMLAYMNEESFYETIKTGKMTYFSRSRQKLWVKGETSGHFQYVKSLTIDCDLDTLLAKVDQIGAACHTGNPTCFFQPLVGIDYDETNPLRIFESVYDTIADRKENPKEGSYTNYLFDKGIDKILKKIGEEATEVVIAAKNSNPEEVKYEIADFLYHAMVLMVEKGLTWEDIVKELADRMNRTVTRTRTTKETDITVTLNLDGTGKTEINTGIGFFDHMLNGFARHGLFDLTVHAKGDLEVDSHHTIEDTGIVLGQAILEAIGDKAGIKRYGHFMLPMDETLALCAVDLSGRPYLNYNAEFVSDKMGEMDTEMVREFFYAVSYSAMMNIHLKILDGINDHHKAEALFKAFGKALDMATMEEPRIKEAWTTKGSLMEIIRKALLNIRTYHEKQRQYSWFDSKPDGTILGQKVTPLHRVGVYVPGGKAVYPSSVLMNIVPAKVAGVDEIVMVTPPGKDGKVTPNTLVAAHEAGADVIYKVGGAQAIAALAYGTESIPKVDKIVGPGNIYVALAKKAVYGYVSIDAIAGPSEILVIADETANPRFVAADLLSQAEHDELASAILVTTSEELARKVSDEVDGFLKELSRSEIIRKSLDNYGYILVADTMDDVIDIANEIASEHLEIQTKNPYDVMTKVRNAGAIFIGEYASEPLGDYFAGPNHVLPTNGTAKFFSPLSVDDFIKKSSIIGYSEEALRDIHKDIEAFAEAEQLTAHANSIKVRFEGEEMQILPDPFLLLHERGFPELXXXXXXXXXXXXXXXXXXXXXXXXXXXXXXXXXXXXXXXXXPPVSSLLHLLSNAVFSMRYLTFALGKGRLAKQTLELFEKIGITCEEMKDKDSRKLIFTNEELKLRFFLAKGPDVPTYVEYGAADIGVVGKDTILEEGRKVHEVLDLGYGKCKMCVCGYKDAAPLLQHHELIRVATKYPNIAKDYFYNTKHQTVEIIKLNGSIELAPIVGLSEVIVDIVETGSTLRENGLEVLEEVCPLSARMIVNPVSMRMESARIKDLLTRLREQVMKKKLHTPEGVRDIYNVECGKKLALESRLKKVFHLYGYHDIQTPTIEYFDVFREEIGTTPANDLYKFFDKDGNTLVLRPDITPSIARASATLFKDENLPIRLCYTGNTFVNHSSYQGRLRETTQMGAEFVGDDSVEADAEMLALVIESMLTIGLKEFQLCVGNVDFFQSLIEDASLDEEAEERVRELIGNRNYFGVEEFLDSIQAKRSSKEAFSALNELIGGIDILEKAENLAPNSKGVMAIRRLEKIYHILRYYGVEKFVTFDLSMTGTYGYYTGIVFRGYTYGTGDAVVKGGRYDHLIEKFGKKSPSIGFAIVIDELVSALTRQKIRIVYPRKNTIIIYAEGRQLEAIRLAKDFRRKAKNAELLKKDENSGLEDYIRYGNDYYAGSLVYIEETGEVTMVNLVTGEQKIVNSTDRSMGTWNSRGLRGSTLEDMVNRTNEWYLEKNLALMQKIPTPITPVRMDKEHRQITLAYFDQRSTIDYIGAVQGIPVCFDAKECVAETFPLQNIHEHQVEFMKNFEKQQGIAFILIYYSSRNILYYMRFEELYKFWMRAQNGGRKSFRFDELDERFFMKFFRGCYVPYLDALNLDLELRDELDKTDETAYNAKMKELIIHDNEAGQRLDKLLRKYLSEAPGSFIYKMLRKKNIVLNGKKATGNEHLKKGDSVKLFLADDTIAKFQAAGKTVEESIKNTVKLDVIYEDQNVIFINKPSGMLSQKAKETDVSVVENVTAYLLESGQLTRENLKTFRPSICNRLDRNTSGLIVAGKSLAGLQQMGELFKKRTLKKYYLCIVKGRITEPAHIRGYLVKDEKTNRVSLSKGGFSKDAKGLPIETEYVPIAWNEEMTLLKVHLITGRTHQIRAHLASTGHPLLGDYKYGSKKWNDRYKKEWKIEDQVLHAYQLTMPGMKKELENLSGKTFYAKVPEVFWKLIKETAWEHGTREALEVLHMRTEKGQPGYVKARKQKYLLGAVVEFAIVIAIFVTGYIQTGSRLNLLTVVAVVGCLPAAKMLVEFITMAPYKSIEEAKYQELEEKAPLILKAYDMIITSSQKVMPLDAVVVSGHIVCGYASNPKTDEAALARHIKDILKDNHYDKMTVKIFHDYTAFLSRAEGMNNMAAVEQKESLRREKKIRKIILNISMMKNRQPDGCREVLKLKIAIVTGASSGMGREFALQIPQLYKNLDELWVVARRTDRLKNLQEQVKIPVRIFDGDMQRDYIFEKLQRELDRRQADVRMLVNAAGYGKIGNVSDIDLKEQCGMVDLNCTALTRMTGICLPYLSKGSRIVNLASAASFCAQPGFCVYAASKAYVLRFSQGLAAELKKRGILVTAVCPGPVRTEFFDRAGALAASEKEALCAEPEAVVTQALTDSVRGRRVSVYGAAMKGSRILSKILPDRLLVWGMMKINHADIMSENKFLPICKKDMEERGWEQLDFVYISGDAYVDHPSFGHAIITRLLEAHGFKVGIIAQPDWKDKNSITILGEPRLGFLVSAGNMDSMVNHYSVSKKHRRTDAYTPGGVMGKRPDYAAVVYSNLIRQVYKKTPIILGGIEASLRRLAHYDYWSDKLKRSILLDSGADLISYGMGEHSIIEIAEALDSGIAVSDITFIAGTVYKTKSLDSVYDAEILPGYEDMKQDKLEYARSFYTQYCNTDPFAGKRLVEPYNAHLYVVQNPPALPLSEGEMDDVYGLPYMRTYHPSYEKDGGVPAISEVKFSLISNRGCFGGCSFCALTFHQGRIMQVRSHESLLDEAKMITQEKDFKGYIHDVGGPTANFRQPSCEKQLTRGVCKNRQCLFPKPCPNLKVDHRDYIKLLKELRDIPKVKKVFIRSGIRFDYVVADKSDAFLEELCRYHVSGQLKVAPEHVSDDVLTLMGKPENSVYQEFVKKYNKMNQKIHKDQYLVPYLMSSHPGSRMKDAVELAEHIRDLGYMPEQVQDFYPTPSTISTCMYYTGVDPRTMQPVYVPKNPHEKAMQRALIQYRDPKNYDLVMEALKKAHRMDLVGFDKHCLIRPRKFEGRSQQKVPGQKTQNQKSSGKPGRNDRGKNKNEHSRRNTVQSDRQNSRQKKKSIRNVHKKKMMRLDKYLAEMGVGTRQEVKKQIRQGKVTVNGTVVKAADTKIDETCDEVTIGGRNISYVSYEYYMLNKPGGVVSATEDRRDTTVIDLIKDKKRKDLFPVGRLDKDTEGLLLITNDGDLAHRLLAPKKHVDKVYYAKIDGMVTEEDVKRFAEGIDIGAEEEEMTRPAKLDIMKSAEESEIRLTIHEGKFHQVKRMFLAVGKEVTYLKRERMGTLCLDENLKPGEYRLLTEEEIENVRKMNLPAAFEEKMRALLGDEFDEYIACYEEPRYYGMRVNTGKISVEEFEKICPFEIRKIPWIENGFYYDGDKVSPAKHPYYFAGLYYLQEPSAMTPANRLPVEPGDKVLDVCAAPGGKATELGAKLQGEGVLIANDISSSRAKGLLKNIEVFGIGNVLVLSEEPGRLENYFTEYFDKILIDAPCSGEGMFRKDKKMVKAWEEHGPEFFSNLQRNIILQAARMLKPGGLMLYSTCTFDPSENERIIEHLKKEYPEFHVLPMENYEGFCPGIPEVTEEKDEELKKTVRIFPHKMKGEGHYVALLQKGAPLPAKELKPKKKSGKIPADLEEFMKQVTWKLDGSRLDIHGERIYYMPEGLPDVRGIRFLRTGLLLGELKKNRFEPSQAFAMCLKKDEYAQIIDLPCEDERVRRYLKGETLDVDDLTERKAKGWYLVCVDGFPLGWGKVSNGTLKNKYLPGWRLCMAVLNELEPKEVFRFFEEISAIPRGSRDTKRISDYLVAFAKERDLKVIQDEVNNVIIFQPGTPGYEESEPVILQGHMDMVCEKTSDSTHDFKNDGLELYVEDGFLKAKDTTLGGDDGVAVAMALALMDSEDIPHPPIEAVFTVDEELGMEGAEAIDLSVLKGKKLINLDSEEEKTLTVGCAGGVRYQGLIPVEKKTASGEVIKITIQGLLGGHSGEEIHRQRGNANKMMARLLYHIAGEKNYRLSEIYGGSKDNVIAMEAHASILAEPEDCEEILAMIRDMESIWNAEFMGEEPGLTVKTETEKVENIVVFSKDTTQKVVGYLTACPNGLKEYSRKVAGATETSLNLGVVSMKENGVEAAFLIRSAVDSRKQQVLEEVEAVTKAFGGSGSLSSEYQAWQYKPQSELRPVMVEAYKEVYGKEPEICIIHGGLECGIFLGKRPDLDCVSCGPDVLDIHSYNERLDIASTQRSWEFLKLVLKNCKMSRRHFLTIPILIFFLCMLSFPQTVFAGASYGLLLWFRHVLPTLLPYMVLINILIRTPALHWICHITSPFLCPLLGTSYYGTFAVLTGFLCGYPMGAKTASDLLDAQKISRSEASYLLSFCNNTSPAFILNYVVIQNLKKDSISIPFLLILTLTPLMMSFVFRLFYRAKDHIHPFSHLMQVSSSTASQSENLSGNYFDRCIMNAFESITKVGGYIMMFSVLIQLLASALPDNTASLLLYSSLEISTGIRRLASSALYTSHKIILCAALTSFGGWCCIAQTYSMISGNHLPILPYIAEKLATALVTSLLISAYIYAIMSSRIEQIIEEIEEYIDSCKFQPLSTTKIIVNKDQMDELLRELRMKTPDEIKRYQKIIANKDAILADAQAKADGMIQEAQIQTNELVSEHEIMQQAYAQANEIVTAATAQAQQILDNATNDANQIRIGAIHYTDDLLSQAESAIGRTLDTYTSKYDSLVNSLQECYDMVRNNRAELDVPPETEQSVQSEYPQDEYPAEEYPQNNYEQDAYGQDDYLDDENQYPNDMSVSGYDIQEDDTLDMLTGIYPGSFDPVTYGHLDIIKRSAEMVDELVVGVLNNKAKTPLFSVEERVKMLKEVTKDIPNVKIIPFEGLLVDFAHKLNAKIVIRGLRAITDFEYELQMAQTNHKLASDVETIFLITNLQYSYLSSTTVKEVAAFGGDISQFVPDYIEQKVWGKMKHKRRVMRVIAGSARRTQLKTLEGMDTRPTTDRIKETLFNMIAPYLYDSIFLDLFAGSGGIGIEALSRGAMEAVFVEKNPKAMACVKENLQKTHFERKGMTMQMDVMTALYKLEGEKQFDYIFMDPPYNHELEKSVLTYLAESSLLAEEGIIIVEASKETDFDYAEDLGYNIIKEKEYKTNKHVFLEPAGRKEICMKTSEDLKQILERIDHRGYPAYKDTRGAYQFGTYILGIDHVQGDPFAAPSRLHIQVAGRAARIPGNLYDSKCKKMAVADYLLRNFAKQLERYSFQAHGSGKSGIIQVTRCGQEVLERTACEIEEKTGNIIVRFEVGFPARGRTIQAGELIKILYQYLPACVEKALYYKNMDQNAVKRAAELAVDQEYIREQLKKEGLIAFVADGSILPRESGVSQRPMKDAVPFVSPDSMKVTMKLPYKGVLTGMGIRKGITLVVGGGYHGKSTLLKALESGVYPHIAGDGREYVVTDDTAMKIRAEDGRSIRHTDISMFINDLPNGKDTYAFDTEDASGSTSQAANVIESMEAGTQVFLIDEDTSATNFMVRDELMQQVIHRDMEPITPFIERVRDLYQEYGISTVLVAGSSGAYFQIADQIIQMDKYVPREITELAKEAASDYPALKFPEEKPEQPSFDRKVRKNPGIRQKGRVKLKTMGRDAVMIGHETIDLRYVEQLVDSEQLNTLGQIVRFLEEEIFDGRKTLGQAIEQVENVLDKKGLAGVCEGNTVPGNLARPRIQEIYACMNRYRKLGTDRKERGMYISEIRTKAPADERMPLERKFYDTLEKLKIPYEQVDNDPASSMEECAEVDKAIGTEIRKNVFLCNQKKTTFFLLVMPADKAFDTSSFSKKLGVSHMSFAPPEKMLEHLGTTPGSASVAGLLTDEDDYVQVIIDKEVAEAEWFGCNPGINTSHLKFKTKDLLQKYLPAIHHRARIVDLMKYVLASASPRRQELLTQAGFTFDVIPSAVDEKITKDIPSDVVMELAHQKALDVYESKIKDNPAYQGEDCIVIGADTIVSYRGEILGKPADNEEAFDMLSMLADRTHQVYTGVTFAGCIRGQQILHTFYEKTDVTFYPVTKEDLHAYVDSGDSLDKAGAYGIQGAFAIHVKGIEGDYNNVVGLPIARLYHELDSILPKEKIHYAFMHSSRSKQKYEKSALRISITGSTIFVILEIVMAVITRSQAVLLDSVYDGVEILMVFVSLSLVPLMYKPSSESHPFGYQQIESLFVVVKGAIMIAVTVGLIINNIQIIFHGGQHVNFSMVAYFEMSATLVSIAVIFLLRRMNSKLTSPIVIMEIQEWQIDSVASFGMCIAFFLPQIITGEWFQPLIPYLDPILAIILSLFMLPVPIKTVITGLRDLFLLPPEEETVQEIKDIVSPILATYGDTKLYYDILRTGRKLWISVYITMNRDMISISKFKSVQKEIIQALSKEYQDFYFELLPDIEYTGDTEVPEPVPDEEETMRLKDTGLTAQELKDMVNKYMVETYERYDFIAERAEGMYLYDEEGNAYLDFYGGVAVNSCGNRNPKVIAAIKDQLDDIMHTFNYPYTIPQALLAKKICDTIGMDKIFYQNSGTEANECMIKMARKYGVDNFGPERYHIITAKHGFHGRTYGAMSATGQPDNAIQMGFKPMLPGFDYAEYNNLEDFKSKVTENTIAIMIEPVQGEGGVHPATQEFIEGLRKLCDEKDMLLLFDEVQTGWGRTGAPMAYMGYGVKPDAVSMAKAVGGGMPLAACCATEKVAKAFTAGTHGSTYGGHCVTCAAGLASVTEILDNNLSENAKEMGEYMKQELAKLPHVKEARGRGLLVGCEYDIPIAVEVKHGCLNRMALITAIGDSVNRMIPPLIVTKKQIDELMLIMRASIEDAAAKYESKMSNVIVKENESLDSALRRFKRNCAKAGIQQEIRKREHYEKPSVRRKKKSEAARKRKYNMQKYGVNELRRMFLEFFESKGHLAMKSFSLVPHNDKSLLLINSGMAPLKPYFTGQEIPPRRRVTTCQKCIRTGDIENVGKTARHGTFFEMLGNFSFGDYFKDEAIHWTWEFLTEVVGLDPDRLYPSIYQDDDEAFEIWNKEIGIPAERIFRFGKEDNFWEHGAGPCGPCSEVYYDRGEKYGCGQPGCTVGCECDRYMEIWNNVFTQFDNDGHNNYTELEQKNIDTGMGLERLACIVQDVDSMFDIDTLKALRDHVCNMAGVEYQKDDNTDTSIRVLTDHIRSVTFMISDGILPSNSGRGYVLRRLLRRACRHGRLLGIKGAFLVKLAQTVIDGSKDGYPELEEKKDFIFNVIAKEEAQFNKTIDQGLSILADMEEEMKKNGETVLSGKNAFKLYDTYGFPIDLTSEILEEKGLTYDEKGFEEAQKEQRAKSEGTFGTHNYSGKDASVYDELDAELSSEFVGYNQLEVESDVTAMTSETEVVDALTDGDMGTIIVAKTPFYATMGGQEADKGIICTEDGEFVVEDVVKLAGGKFGHVGQVTKGMIKVGDKVTLKVDKENRALAENNHSATHLLQKALRMVLGNHVEQAGSLNNAQRLRFDFTHFSAMTAEELQKVEDIVNEKIRENLPVVIKNMPIEEAKKTGAAALFGEKYGDIVRVVSMGDFSIEFCGGTHVKNTGNIMAFKILSETGVAAGVRRIEALTSKGLLDYYSAQEKKLHETAKLLKATPENIEEKVSHLMNENKVLKGEVESLKSKLAKDAMGDVMNQVEEVKGVKFLATSLEGVDMNGLRDLGDQLKEKLGEGVILLASVNDGKVSLMATATDGAMKQGAHAGNLIKAVAKLVGGGGGGRPNMAQAGGKNPAGVEDALKVAKEALEGQLAMMRGINTTVRRLRRKVFEEVAALGFKADADTLCDDMEAIPYALVNDETEQYRDSVYRARAVVREQVRLAMGLALRPEDKPVHLTAGVEASNISDKYYEPPLMQVIPSACMRCEAKGYEVSNMCKGCLAHPCMEVCPKGAISMVNGKSYIDQEKCIKCGKCKSVCPYDAISKKERPCAKACGVNAIENDKVGRAYVNPDKCVSCGMCMVNCPFGAISDKSQIFQLARALSEGEQIIAEIAPAFTGQFGDNINARNLKAALEELGFSQVYEVALGADIGAVAEAHHYVEKVTTGELPFLLTSCCPSWAMLAKKYFPDMIDEVSQELTPMVATARTIKKEHPNAKVVFIGPCAAKKLEAMRRSVRSDVDFVVTFEELQGMFDAKEIDLSEYEAESSFHNATGVGRGYAVAGGVASAIEKCVNEYYPGVEVKIEHAEGLADCKKILSMAKIGRMNGCLIEGMGCPGGCVAGAGTNIPVPKAQKKVQEFVKASSKQLPPKELGEIELKMGLILPEHYDPRLSVRETQEAIKYIRDTFQKEFGKEMNLERISAPLFVEKSSGLNDDLNGVERPVQFDIAGVPGETIEVVHSLAKWKRMALYKYGFQPGEGLYTNMNAIRRDEELDNLHSCYVDQWDWEKVIKKEERTVETLETTVRNIFKIIKHMEHEVWYKYPQAVKKLPEDIYFITSQELEDMYPDKTPKERENLITKEHGCVFLMKIGDKLASGEPHDGRAPDYDDWQLNGDILFWFETLNCALEISSMGIRVDEKALEEQLVKAGCEERKNLPYHKMLLNGELPYTIGGGIGQSRLCMLLLDRAHVGEVQASLWPEEMREACREHNIILLMLLERLGKELLYFDGGMGTLLQSKGLQPGELPEVWNLEHAEEIIDIHKAYFEAGSDIVLSNTFGANAIKFHDSKYGLKEIVTAGIQNAKKAAERGVHDGRKTYVALDVGPTGKLLKPMGDLSFEDAYDAFKETMIYGEQAGADLIHIETMSDSYEVKAAVLAAKENTSLPVFATMIFDEKGKLLTGGDVPAVVTMLEGLRVDALGINCGMGPEQMLPILEDILKYASVPIIVKPNAGLPKQRDGEVYYDVEPEQFAGYMAKIVEMGAHVIGGCCGTTPAHIQKMVETTREMSVKPATKKDITMVSSYGHAVILGGKPMIIGERINPTGKKKFKQALKDHDMDYILKEGITQQDKGAHILDVNVGLPDIDEPAMMKEVIMELQSVSSLPLQIDTVDITAMEAAMRIYNGKPMVNSVNGKQENMDAVFPLIKRYGGVVIGLTIDEDGIPATADGRVRVAGKIIEEAKKYGIDKKDIVIDVLAMTISSEPEGAKVTLEALKKVRETYGVCTVLGVSNISFGLPYRPAVNSNFYTMAMQNGLSAGIINPSSEDMMCSYYSFCALMNYDKNCEDYIRVYGSQKAGTPAPAAKAELTLKEAIEKGLKEEAHHATGELLKEHAPLEIINEHLIPALDTVGKGFEKGTVFLPQLLMSADAAKIAFAVIKDVLAQEGGEVQAKNKVILATVKGDIHDIGKNIVKVLLENYSFDVIDLGKDVPPEVIVDTAVEQDIRLVGLSALMTTTVVSMEETIKLLRERKPECKVMVGGAVLNQDYADMIGADFYGKDAMQSVYYAQRVFGEEMDARTKEAIRYLGYGRHAVDDHTLKLVESCFEELSQAACGRIVYRIFELEFPESGRILLGNLDIHSKNLYKNLTGCKKAVLLGATLGPKVDLLLRKYSIGDMARVVTLQACAAAMLEEYLDEWQTALEADMKKEGYYIRPRFSPGYGDFDIAHQDMILRMLDTAKKIGLTLTGGNMLTPSKSVTAVIGLSETETSCHIKGCEVCQKKDCAYRRSMKISDILVEKTPHLSFEVFPPKTDAAYEGVLKATEAIAELKPSYMSVTYGAGGGTSKNTVKIASHIKDKYNVPSLAHLTCVSSTKEEVHQVIDQLKAAGIENILALRGDIPQESEFPLPNHYQYAYELIEDIKSQGDFCIGAACYPEGHVESEHKKDDIAHLKQKVDCGVDFLTTQMFFDNNILYNFLYRAREKGVTVPVIPGIMPVTNANQVKRILSMSGTNLPERFKAIVDRFGDNPKAMQQAGIAYATDQIIDLFANGINHVHVYSMNKPEVAAAIQANLSEILNKMKKILFAASESVPFIKTGGLADVVGSLPKYFDKEKYDVRVMLPKYMCMKDEWKEKLQYHTHFYMDLNWRKQYVGVLEMEYDGIKFYFIDNEYYFNGYAPYGDMYADIEKFAFFSKAVLSALPLIDFRPDIIHCHDWQTGLVPIYLDNFRYGNEFYRGIKTVMTIHNLKFQGTWDPKRVRDITGLPQYYFAPDKLEAYKDANYLKGGIVYADRVTTVSNSYAEEIKTPFYGEKLDGLMNARANCLSGIVNGIDYEDYNPLTDNKIERNYDVSNFRKEKIKNKIALQKELGLEENHKTMMIGIVSRLTDQKGFDLVAYVMDELCQDAVQIVALGTGEEQYENMFRHFAWKYPGKVSANIYYSEAMSHKIYASCDAFLMPSLFEPCGLSQLMSLRYGTVPIVRETGGLKDTVEPYNEYEKTGTGFSFMNYNAHEMLATVRYAEQIYYDKKRDWNKIVERAMNKDFSWKNSAKQYEELYEGMMREVNVAIADDNERILDMLGEIIEQDQDLNLIGKADNGEDIYHLIKEKKPDVVLLDLIMPKMDGLSVMEKVNMDEQITKRPEFIIVTAVGQERITEDAFRKGASYYVMKPFHNDMILSRIKDAGNGERKNSSESESRNAVSKKQEYNLETRVTDMIHEIGIPAHIKGYHYLRDAIIMAVDDMDVLNAITKVLYPTIAKMHQTTASRVERAIRHAIEVAWSRGKLDTLDELFGYTVSNGKGKPTNSEFIALIADTIRLENKNRMRKYWYRKCLIITLVFSVFFYTGYSVKEKMERNEKEEVSAGTVSDNTVIPGGMPIGIYLETEGVMVLGTEKVTGTDGERLEPARHLVKAGDYIVECNGTKIRDKKELQTILKTTDGTDVILKLRRDSEYLEVKVKPVRSKKNNCMLGIWVRDNAQGLGTVTFLNSDSRFGALGHGIHDTDTNALMEIRNGRVYETSIRSIQKGIDGNPGGIEGIIVYNRYNVLGKIDKNTDCGIFGTLDRTENLFQDTDPMEIMQTDEIKKGDAKIRCCVEGKVKEYKIRITKIDKHTREENKGLEIEVTDPKLLEITGGIIQGMSGTPIIQNGKIAGAVTHVFVSDPTRGYGIFIENMLKYVEMLQYLHVKNLALIDEIEVEFGRGLNILTGETGAGKSIILGSVNLALGGRYTKDILRQGARYGLVELTFSVENERQIRKLKELDIYPEDGFITLQRRLMEGRSVSKINGETVQMATLKAVSSILIDIHGQHEHQSLLYKKNHLAIVDAFAGEETKRQKEKVVEIWRQYKEKQKELSEAGADESERAKELAFLQFEVDEIVQAELKEHEDEELESLYRRMCNGKRIVQSVTESYQYTGGDGESASEKLGRALRTLSEVSDADEQLAQLYSQLADVDNLLNDFNHELAEYQKNCEFSDEEFYETEKRLNEINHLKTKYGNSYEKIMDYCKKQEERIEILENYDAYMQELKASCEQLEQDYLKRAQKLSTLRKKKANMLEKKIQKGLEDLNFEQVQFEIHFAEKKEYSKDGIDDAEFRISLNQGQQVKPLTEVASGGELSRIMLAIKTVMADKDEIETLIFDEIDVGISGRTAQKVSEKMALIGKEHQVICITHLAQIAAMADQHFLIEKKTEDAVTRTHIYPLTEEKSVEELARILGGAKITDTVIQSAKEMKNLAGQIKMKVNRHAKIIELINKYHIETQEELAEYLNQEGFKVTQATVSRDIRDLKLTKIPSENGKQRYALHQHNENGMSEKYIRVLREGYLSMDMAQNILVIKTVAGMASAVCAALDAMKWNEIVGSIAGDDTIMCAIRSVDDTVKVMDKISKIILMLKKFWIVTNDGKDTNHAVTEKVKELLEIAGRSCILCEKDAEKNIIRERIPDMIDCAIVIGGDGSLIEVARTLWKRDVPILGINMGTLGYLTEVEVSNLAEDITQMLKGDYLYEERMMLEGMFPNGKKDVALNDIVVSRKGDDLRIIYFKLFVNGELLNSYEADGIIISTPTGSTAYNMSAGGPIVEPTASLTVITPICSHALNTRSIVLSSDDEIVIEIGEGRRGNIEKVLVTFDGATSVPLETGDRLTICKAKESTKIMKINKISFLEILRRKMKGNMKERLDVLLVKRNLAASREKAKAIIMSGIVYVDGQKEDKAGTTFPEEATIEVRGHTLPYVSRGGLKLEKAIKNFDVSVEGKVCTDVGSSTGGFTDCMLQNGAVKVFAIDVGRGQLDWKLRQDPRVVCMEKTNIRYVTPEDIGEPVQFSSIDVSFISLTKVLLPIRNYLTEDGQIVALIKPQFEAGREKVGKKGVVREKSTHIEVIHKVIDYAMSIGFEVLNLEFSPIKGPEGNIEYLVHLQKCEATDRISPEIDVEKTVDQSFATLAKGMLERIQKANDIKKLAPEELPELAQEIRQFLIEKISRTGGHLASNLGVVELTMAIHLVFDLPKDKIIWDVGHQSYTHKILTGRKDGFDDLRKYGGMSGFPKRKESACDAFDTGHSSTSISAGLGYVCARDLQKEDYSVISVIGDGSLTGGMAYEALNNASRLKKNFIIVLNDNHMSISENVGGMSDYLAKLRTADFYTDLKKGVTNMLHNVPVVGDPMIEHIRKTKSSLKQLIVPGMFFEDMGITYLGPIQGHSIPMLVRALKEARKIEGPVLLHVLTKKGKGYEPAEEQPDKFHGIGPFQVETGEPEKPKKKDSYTDVFGKVMCDEAARNDKLAAITAAMADGTGLARFRKKYPNRFFDVGIAEEHAVTFAAGLAAGGMKPVFSVYSSFLQRAYDQMIHDVALQNLPVMFAVDRAGLVGNDGETHQGIFDLSYLSSIPNMVIMSPKHKWELADMVRFGISYDGPIAIRYPRGSACDVCPEFRSPIEYGKSEILYEESDIAIIFVGHMFEEALKVREDLKEKGYDCSLINARFIKPLDAKMLDRLTKKHRLIVTIEENVKSGGFGEHVSEYLMRTGADVRVQILALPDDYVEHGNVDVLRKETGLDVESMTAQICKMYETMMNSKEEFTVQMKRKVAEIEEILKEYLPKPEGYQKVIMEAMEYSLMAGGKRLRPMLMRETSRLFGDETEALCPFMAALEMIHTYSLVHDDLPAMDNDEYRRGRKTTHIVYGEDMGILAGDALLNYAFETAFRAFETAPQESLKIGRALSVLGRKAGVYGMIGGQVIDVKETGHAVPKDVLDTIYELKTGALIECAMMIGAILGGAEEEDVRKVEKIAHYVGIAFQIQDDILDVTSTEEVLGKPIHSDEKNQKTTYVTLLGIEQAQKRVEELSNQAIDLLHQLSGENEYLEQLLIQLIHRDRMAEKKEQSLEDQSLEEIFSDLEQTIKEMEDGEISLEESFRLYHQGMDMLKACNSKIDKVEKKMLLLDEEGEEHEFMARNVYTVKQVNSYIKNMFTQDFMLNRIYVKGEVSNCKYHTSGHIYFSLKDESGTIACVMFAGQRGGLSFHMREGQQIIVLGSVNVYERTGSYQLYAQEIRLDGEGTLYEKYQMLKQELEEMGMFAPEYKKAIPRYAKRIGVVTAPTGAAVRDIMNISARRNPYVQLLLYPAQVQGEGAKESIVRGIRMLETKNVDVIIVGRGGGSIEDLWAFNDECVARAIFDCQVPVISAVGHETDVTIADYVADLRAPTPSAAAELAVWDYRQLQGYLDECRLRMNRSMTGTIRINRLRLKELDVRLSYLHPRHKLQDQQQRLIELEEELRTLMRDRVKEARHRLAIQIEKLNGLSPVRKLNQGFAYVEEADGGVVKSIRQVEMGDELTVYVTDGLIRTSVKAVQKKTYKIMKRTEQREHIFKLIFGADFNEESEQGTQTELYLEQIEGATEKDMQYISQKAQKIIEKIDEIDTLINEHTTGWKTGRMNKVDLTILRLAVYEMKWDEDVPTGVAINEAVNLAKKYSSEDGASFVNGVLAKLADMSKEEKNTYTIKTDENLGEVKIADEVVAIIAGLAAMEVEGVASMAGNATRELISKLGMKSLSKGVKVDVLDGIVTVSLALNLNYGYSIKEITSKVQEKVKTAIENMTGLEVADVNIRVAGVEIPEEAMSQITNEVKNQIKKRRTFAIISHPDAGKTTLTEKFLLYGGAINQAGSVKGKATAKHAVSDWMEIEKERGISVTSSVLQFNYDGYCINILDTPGHQDFSEDTYRTLMAADSAVMVIDASKGVEAQTRKLFKVCTMRHIPIFTFINKMDREAMDTFELLDDIENELGIATCPINWPIGSGKEFKGVYDRASKKVEIFSDTKKGTTQGEVKKVDINDPEISWLITDDQKLQLEEEIELQDGAGAEFDQELVSKGELSPVFFGSALTNFGVETFLQHFLQMTTSPLPRISDRGPIDPMEEGDFSAFVFKIQANMNKAHRDRIAFMRICSGEFEAGMDVYHMQGGKKVRLSQPQQMMASERKMISKAYGGDIIGVFDPGIFSIGDTLTTAQDKFTYEGIPTFAPEHFARVRQVDTMKRKQFIKGINQIAQEGAIQIFQEYNTGMEEIIVGVVGVLQFDVLKYRLENEYNVEIRLENLPYEYIRWIENEEIDLDKLTGTSDMKKVKDLKGHPLLLFVNEWSIRMTIDRNDGLKLTEFGRSMKKIAKKNQIVIAMLAVMIAAAGYMNYSGKLFPGKTKTQETNSELANKELLDISDEDTSVSSGDIKSQDGDTGSTDGNASSTDDGSVDGTPGEAVLANGTVSSVAAQAKVSREQVRSKNKETLQSIIDNKNLSDAEKENAVNQMVQMTEIAEKEAAAESLLAAKGFNDSVVSITDDQADVIVGASELSDANRAQIEDIVTRKTGVAAQNIVINPVNADSKMAKNLSDLFSNKLGNWKKFSLKNLRKDQLLILLLTGILLMVIAVPAGKKKENMSSASNDNTEKSVNGTSAGTDEEAYTAYLEDRLSRTLSQIEGAGEVKVMITLKSSAEKVLDKDTESDQETVTEEDSQGGTRQSSKTSKKENTVYRTDSESNSQGSGSPYVSKELSPKIEGVVVIADGGENAVVKENISSAVQALFDIEPHKIRIMKKQTNMEMIYNWILKLSFFAVLGSVILQMIPDHGFQKYVRFVLGLILAAMLVVPVLELFDKRAAFEEIYHDSAYKIRTSELEEKSQKVQEDILDIDGQNVENQNIENSGTGSQNTEDQIQDLNTDRSSDENVSQNRRIEVEQIEIGKESEMRYDMKYKKLNVEDNESCNLQCEKKCEKLAGVFLCCILAFFLLFLSTRNVGLIYCYADELSEDSENTAEDAEQEQQKIKETILSEFEYGEIDDSLRSLFPEKRIVFQEVISEILTGDLKSSVKLLTEFAGEQMLYLLQTGKKNLVHILLIAMIAAFMNQFAGTLQNRQVASVGFYMIYILLAALTVAAFDVVIQWVESGIRNITAFMGVFYPVYFLAVAVAKGSVTGVAFYNLVLFLIYAVEIIIGNVLLPMVRVYMIIRVLNFLGPEDMLGKLSEFLELIIRWTLKTALACVIGANLIQGMISPAIDTVKRSTVLKGAEAIPGVGNLLGGMTEVALGTAVLVKNGIGMAGAVICIALCVIPLVQTAGTALLYKLAAAVIQPVSDERVTGCVEAVGEGCQILLQIVFTVGVLFLLTIAIVAAVTNAMSMLQIGILGVAGVLLALQFKSGKSEYGIYISIALGMLIFASLLGKISLLKDVLNEVSNVVGLNSDYFKTLWKILGITYAAEFSSAICKDAGYQTIALQIEVFAKITILVLSLPVLSALLQTIRGFLVMTINLIFKIAAVGILVSILCQVLKHSGREEQAFLTSLAGLLLVLFWIVPYIYDLFESIQNLFSLMIKAIGAVMVILAGSGWGMLQAAKIEECYRQMRYLRKLIFRIRSEVRYSRRVLPEAFLSVGSEAQEPYKMWLLSLYERLENRQGTSLAGIWEEETRTHLPVIGIPQDMLESLIRLGGELGTIDIEMQVRTLDLYLEQMEQKMEDMRTEQKEKIRLYQCIGVTGGVFLAIILLMKEDTILKVLPWDVRSIIQKEKLEFEYLQEIRLREGKPLIFLYHDTEVIPGAKARRPYLVTKDNIREMLEYISNYSLYACEQEMRQGFITIEGGHRVGLSGQAIMENGKVKNLKYISSVNIRVAHEMIGCADAVFPYIVCNRVLCHTLIVSPPGCGKTTMLRDLIRQISEGNSWIPGLAVGVVDERSEIGGCYMGVAQNHLGIRTDILDGCPKAEGMIMLIRSMGPQVIAVDEIGTPEDVHAIEYAMHCGCKMLATVHAESMEELRKKPLFNQMIGEGRFERYILLGNNAHVGQIEGIFDNRGSLLYKEAMEMAKMREERAEERICLVRRLYDRGMNSAQISELIGLDKEQVEEMLQTKSNFENNGMYKTFEMELAGRPLKVDVGRVAKQANGAVLMHYGDTTVLCTATASEKPRDGIDFFPLSVEYNERMYAVGKIPGGFNKREGKASENAILTCRVIDRPMRPLFPKDYRNDVTLENLVLSVDQDCAPELTAMLGAAIATTISDIPFDGPISTTQVGLVDGEFVFNPTAAQRAVSDMALTVASTREKVIMIEAGANEVPEQQMIDAIFAAHELNQKVIAFIDTIVAECGKPKHEYESCAVPEELFAAIKEIVTPEEMEVAVFSDDKQTREENIRAVTEKLEEAFAENEEWLAVLPEAVYQYQKKTVRKMILKDHKRPDGREIDQIRPLAAEVDLIPRVHGSAMFTRGQTQICNICTLAPLSEAQKLDGLDEAETTKRYMHHYNFPSYSVGETKPSRGPGRREIGHGALAERALLPVLPSEAEFPYAIRTVSETFESNGSTSQASVCASSMSLMSAGVPIKAAVAGISCGLVTGDTDDDYLVLTDIQGLEDFFGDMDFKVAGTHKGITAIQMDIKIHGLTRPIIEEAIAKTRKARLYIIDEVMNKAIDAPRAQVGEFAPKIVQMQIDPQKIGDVVGQRGKTINAIIEQTGVKIDITDDGAVSICGTDAKSMEEAQKLIHIIVTDFEAGQVLEGKVVSIKDFGAFLEFAPGKEGMVHISKLSKERVNRVEDVLTLGDVVKVVCLGKDKMGRISFSMKDVAEMISKEQKEQIVAQYGRTAGDTGSPEVQIAILTARINDLTDHFKANPKDHHSRRGLLKMVGQRRGLLAYLKKTDIERYRALIEKLGLRKMQYIRELAEYNGNGRAAVTFGKFDGLHRGHQMLVTKVRELGKQENINSIVCSFDMRPLWKEKGIAPELLMVGEERQERVKDEVDYLIECPFTESFRQKSAEDFIQEIIHDLFRAKYIVVGTDFTFGCEKRGDVHMLAEYADQYDYELIVIEKERYHDRIISSTYVKEVVKEGDVGLAETLLGYPFEVEGTVEHGRQLGRTLGFPTLNVAWPEGKIVPAHGVYFCKIDIEGKTYPGIANVGIKPTVTEEKKLLIEAFLFGYSGNAYGEKVRINLKKFRRPEQKFDGIDALKRQIDKDIAKGMEYFGIVMIHGIINVYKEKGFTSHDVVAKLRGIVGQKKIGHTGTLDPDATGVLPVCLGKATKLCDLLTDKNKTYEAVLLLGKTTDTQDITGEVLEEKSTEALTEEKVREAIEGFIGDYEQIPPMYSALKVNGKKLYELAREGKVIERKARPVKILDIQILEIDLPKVRMEVSCSKGTYIRTLCHDIGEKLGCGGCMESLIRTRVSTFRIEDAKTLDEIETLKQEGKLAELLVPIDAMFPFYPKITVKDDWKAFAKNGNPLDLKMLKEACGQDEETQVRLYDESGKFIAIYQWKEKKYHIVKMFFNEMLNKVLENVSTIAIGGHVRPDGDCVGSCVGLGQYIRENYSDKTVDIYLKDIPESFHFLKGTETILESVDDEEKVYDLFISLDCGDTDRLEYSKTLFNKAKHTFCVDHHISNIGFADVNHIVPEASSTSELVYGLLDEEKISQNVAEALYLGIVHDTGVFQYSCAGPETFRVAANLLEKGIDGPKIIEDTFYAKSYAQNLVMGRALMESILFLNGTGIASYIRRDVMDFYGVGPKDLEGIVSQLRVTEGVEVAVFMYELKQNEFKVSLRSKEKIDVSKIAQYFGGGGHKKASGFTMAGTPFDVLNNLSKQIEAQMEKLEKTQEQMRKRSIKNTRVNTEVQHELSNIIRGGLKDPRVAPWTSVVAAEVAPDLKTCKAYISVLGDAYEQEQTIKGLQSAEGYIRRELARTLNLRNTPEIKFVLDQSIEYGVNMSKKIDEVTKDLKTEGVEEDAEMSNNKDIETNTNENTQKSETPKKKNIVHVIRPQNAQNGGNKGRRSGGNRQNSGQGKPMQVNNGRPARRSDRSAAQNASAEEAQAPKRTEKPAAERTQNRRPERSERPERSERNERSDRNDRSDNRNNRGGERRGGRDGRNGDRQEGRGGQRFQRGDRPQNGRSDRNQGDRDNRRDNNRGDDRQGRKFGDRNDNRRNDRKNNPSIPAPAIEGQKPQRKNAKGKDDHKKKDYRRDDEERMPKGKKKNEPKQQLQKPQQKEQKVEEEIKQITIPEVLTIKELADKMKIVPSVIIKKLFMQGKVATVNQEIDYETAEEIALEFDVLCEKEEVVDVIEELLKEEEEDEKKMKKRPPVVCVMGHVDHGKTSLLDAIRHTNVIDREAGGITQHIGAYVVEINGEKITFLDTPGHEAFTAMRMRGASSTDIAVLVVAADDGVMPQTVEAINHAKAAGVEIIVAVNKMDKPSANIDRVKQELTEYELIPEDWGGSTIFVPVSAKTGEGLEDLMEMIALTAEVMELKANPNRRARGLVLEAKLDKGRGSVANILVQKGTLRVGDPIAAGSAFGKVRAMMDDKGRRVKEAGPSTPVEILGLNDVPNAGEVIVGCGNEKEARNFAETFISQSKVKLLEETKSKLSLDDLFTQIQEGNLKELGIVVKADVQGSVEAIKQSLLKLSNDEVVVKIIHGGVGAINESDVSLASASNAIIIGFNVRPDATAKETADREGVDIRLYRVIYNAIEDVEAAMKGMLDPVFEEKVLGHAEVRQTFKASGVGTIAGSYVLDGVFERDCSVRLTRDGIVIFEGPLASLKRFKDDVKEVKAGYECGFVFANFNDIKEGDLVEAFKMVEIPRMSQNKALSMIGLATKAGKVASGEFCTEKEVKSGRAYLVIVADDASDNTKKKFQNMCDFYQVPIYFYKDKDTLGHAMGKEFRASLVILDEGFAKGIRKHIDTENQTIAMGANKKVPMRKCVGCQEMKSKKEMIRVIRTSEGEFLLDATGRKNGRGAYLCPNGDCLAKAVKNKGLERSFKQAIPKEVYEALEKEMEVLESENHFGKTDNIKLIMNKETCEYQLYAEKTVVEEVEDKLEQISLEDAKEIDSKFELGDIVHIPIESKSFGRIATQNAKNLILQKIREEERKVVYDQYFEKEKDIVTGIVQRYVGKNVSINLGKADAMLTENEQVKGEVFKPTERIKLYIVEVKNTTKGPKILVSRTHPELVKRLFESEVTEVKDGIVEIKSIAREAGSRTKIAVWSNDPDVDPVGACVGMNGARVNAIVNELRGEKIDIINWSDNPAILIENALSPAKVISVMADPDEKTASVIVPDYQLSLAIGKEGQNARLAARLTGYKIDIKNETQAIESGELPENYMELSEGVYEEEYDDDAEEFDVENTADAEYDDDDAEITFDEVEDTEEMGKNHYYLKHLAPDVRLYTFVESTKKLYKYTPKGVEIASFTRTKNTRKRTSMLVVENYKLFSDILNIKFDMLSRYQYKENYTNTTLSVKKLNRFTKKIKDKLSELNNAITISETVDIINDELMGAELKKKVVRNGLKLLQLICGKACAGSSIGMYEIMSADEAIRLIRDGDCICVNSFVGIENPTELHEAIYRRYQKMQSPTHLTIVSSAGFGVWDEEHNAEGYIREGAVDKLICGHFGAMMSTKKLVLEDRFEAYNLPLGCISHAIRAQAGGLPGALSKVGLDIFVDPRREGPGINRISIDDSLVKHVEVDGDEFLYYKLPKITIALIKGTAADRKGNITFDDMFMSGDALSICQAVKANRGKVIVQVDRLVDTPSRPRNAIIPGCLVDAIVVAEPEKRNEAYTALTGSFEIPYKDWYTWSEKIENVSTKPKKNSVTGNIIGKRAAQELRVDDIVNIGIGIPEMVSRYARKSGMLDMVTLTVESGGIGGFPVSGEAFGAMIGAASVYDMANQFDLYDNGGLDICFMGALEVDKYGNINAHRGPGAFAGIGGFANITAKTPTVVFCMTFDAKGLEVTQKKGVVTIQKEGEIAKFVEKVNSVSFSAKRAIENGQKVLYVTERCVFRLTPKGLKLIEVYPGVDMQKDILDRLPFEVEIMRNYTTQMDAARKGIVTPEIEIVAKKENMTTEALMKLVAEGKVAICANKNHTSLDPEGVGSMLRTKINVNLGVSRDCKDYNIEMEKVMSAVNLGAEAIMDLSSHGNTQPFRQKLTHECPAMIGTVPVYDSVIHYQRDLATLTAQDFIDVVRLHAEDGVDFVTLHCGITRKTIEQIKKHKRKMNIVSRGGSLVFAWMCMTGEENPFYEHYDEILDICEEYDVTISLGDACRPGCLADATDVCQIEELVRLGELTKRAWDHNVQVMVEGPGHVPLDQVAANMKVQQSICMGAPFYVLGPLVTDIAPGYDHITSAIGGAVAAMNGAAFLCYVTPAEHLALPNVDDVKQGIIASKIAAHAADIAKGVPGARDIDDKMAEARQKLDWDAQYACALDPETAKAIRDSRSPEDDHSDTCSMCGKFCAVRSMNKALAGEYIDILMTHTTLSSDSSRTRRLALAGVFTALAIVGSFLSFPVAGSKCAPVQHIINILAAVTLGPWYSVGIAFCASLLRNLLGLGSMMAFPGSMVGALCCGLVYSICHKLSLTCLAEALGTGILGGLAAYPVAVYIMGITPAGIFVYVVPFLISTIAGSILAFLLITALNKSGVMAMIKTTRMRENNLERFIKAQESEFKTALAEIKSGHKRSCWMWYIFPQIQGLGSSGTAMYYAIEDYEEAKAYIENAVTNAHLRESSEALLQLESDDATRVMGWPDDLKLRSSMTLFALAAKENEVFRRVLDKFFDGKLDAQTVDILDMRYLVMRIDEPDFGCEGRPDGVEPMAKVTLLKLKSEEEIQLEIPDAELYQKEINEGNEVAFSPDGVILKLSMKNKKEKKQEEEELTGMAAVWDYLKTFLIIFCVVFAMNKLVYINAVIPSESMQNTIMKGDRVLGNRLAYIKDDPERYDIVIFKYPDDPSKIFIKRVIGLPGETVTVKDGKIYIDGKEQTQAVSFCPEEMAGSFGPYEVPEDSYFVMGDNRNNSLDSRYWDNTYVKKEAILAKAGFRYWPLNKVGFVNKSAEKMEKDMTAGTPGKIIFNFTMPIFIGNIFQQFYNMADTVIVGKFVGNAALAAVGACGTLVFLIIGFLQGVTAGFTVVTAQHFGAGNMKAMKKSVASGAVLTGIVTVILTLLSMISMAKVLHLMNTPSDMYGEAYGYIMVICGGIVAQALYNYLASVLRALGDSKRPLYFLVIAALLNIVLDLVFIIVFRMGAAGAAYATVIAQGISGILCLLYIAKKVPALYLHREDWEIDKNLAGWQLKIGLPMAFQYSITAIGTIVVQSCLNILGSTAAAGFAAASKIEQVFTQAYVALGTTMATYCAQNMGAGKYTRIRKGFKSATLIGFIYAVVTGVIIFFVGKYMTIFFVSENVNQIMEYVDIYLRCVSVSFLPLVIVNLYRNGIQGMGYGLLPMTAGIAELVGRSGASLIASHFGSYMGICLASPAAWVLAGTLLLIMYFEIMKGKKDRNLKNRMNQRVIKKVRCNICSAGCPIDAYVEEGTLVSVEGSRDLPGQSGGLCSKGAASRQYVYNKDRILYPMKRIGKKGSGEFERISWDEAYRMIAENLLRIKKEYGPQAAAFYAGYPKWYRPALLRLANAYGSPNYCTESSTCFQSAAMAWKSIYGNDICFPDLMHAQTVLVWSNNLYHSNVGMARPYQSLKARGAKIIAVDPRETVTTQAADIHLKLLPGTDGALALSMAQVIIEEGLYDKEFVEKYVYGFEEYKAYVNQFPPEKAEKITGVDKKLIREAARMYASNGPAGVMFSASPVVHNINGMQNYRAVMCLIALTGNYDIPGGNPSRPGPVSPCNEYGKVKRLDTIEAIGEKDFPAWFDLPCEEAQCTRIADYILKEEPYPLKAVVGFGLNHRMWPEPEHFQKALKALDFYVNVDLFFSDSSKMADLVLPAASSFERDVVLNGRGGMFFLSEKAIEPVGEAKNDIEIMIGMLRAMQLHDEALEHGYEKYMEYILEPSGVTLEELRAHPEGVKGRVITPPAFKRYEKEGFHTPSGKVEFVSQILERYKDSHGYSGLPEYRDFREVSGMDREAYPLILNTGSRKPQLFHARTYRVPWLAGLEEATLVEIHPKDAKKYGIADGDMVRVSSPVGSICGIAAVYLNSQPGIVHVYHGNAKGEANDLIDRNYLDPISGFPGYKSYFCKIEKEKGEVKAMSYRLKFDPDKCVGCYACHIACLDAHHDVEDVDAKSHRTVKKVVKNQFEKNICPGCAHCGICIKACPVQAIYKDPKTGFVLTDKEKCIGCHACEKVCPKDVIHFDKDGKMEKCDGCIERIREGREPACVRVCFSGAITLEMLKIKEYVKAESLEQAYELNQKRTNCILGGMLWLKMSNRNVQKAIDLSGLGLNQIEETEEEFRIGCMTTLRELECHERLNQWCEGAVKDAVSDIVGVQFRNLATIGGSVFGRYGFSDVLTVFLAMDSYVELYKGGIVPLQEFAQMKRDNDILVRVIVKKDQRNMIYLAHRNSKTDFPVLTCAVSVNAENGCVCIGARPQKAVRLELTEAVREKVWSGVCTEEEMKKEAECIASQVKTNSNMRAGKEYRSRLAYVLIRRTLEALNTKGGDQMKVKILLNGTMREAEISSDQLLIDFVRDHGCYSVKRGCETSNCGLCTVFVDDKPVLSCSMLTARVDGCKVDTLEGLQEEAKEFGAFVADQGAEQCGFCNPGMIMNAIAMFRENPEPTREEIKTYLAGNLCRCSGYEGQLRAMEAFIEYRKKGERSMKAVGQPIRKKDAMALVTGKPVFMDDLAPKDCLIVKVLRSPHANAIVKSVKTDVAKRVPGIEDIYTWEDVPHERFTTAGQTYPELSPYDRLILDQHVRYVGDPVAIVAGENEACVDKALKMLKVEYEVLPAVLDFHTAKDNEVLVHPEDNWKALCQVGADNKRNLCACDSTEDGNVEAVLADCDEVVEGTYHVRAAQQAMMETFRTTCFMDAYGRLNILSSTQIVYHVRRIISNALGIPKSRIRVSKPRIGGGFGAKQSVVAELFPAFVTWKTGKASKMIFTREESQIASSPRHEMEVHVRLGASKEGKIRAIDVYTLSNTGAYGDHGPTTVGLSGHKSIPLYSSAEAHRFTYDVVYTNHMAAGAYRGYGATQGIFAVESAVNEMAERLHIDPVEFRLKNMVREGDVMPAYYGETAQSCALDRCLERTAELIGWKDKYPCKDMGNGKVRSVGIAMAMQGSGISGVDVGSATIKMNDDGFYTLMIAAADMGTGCDTILAQMAAECLDCPMERIEVLGADTDASPYDSGSYASSTTYITGKAVEKACQKLIARILEIASGMLEAPVEELVFASDHVEWPKEQKSVSLEDIGTKSMCGNGCALEVTESNTSPTSPPPFMAGAVEIELDKETGHVEILDYKAVVDCGTVVNPNLARVQAEGGIVQGIGMTLYENIQYNEKGRMLNNSFMQYKVPSRRDMGNLQVEFESSYEPTGPFGAKSIGEIVINTPAPALAQAIANATGIWFKDLPITSEQIAMGVLEKELEKMQLLKDRIRKDGKIKEGNVLKVDSFLNHQMDVKLFQEIGKEFKRRFADEEITKILTIEASGIGIACVAAEVFDVPVVFAKKTQTKNIAGDVYTTKVESFTHGRVYDIIVSKEFLGKGDKVLLIDDFLANGKALEGLAELVTKSGAELVGAGVVIEKGFQVGGDIIRSKGIHLESLAIVESMDEKTGEVVFRDMKRVLLKLSGEALAGDKKTGFDEATCMGVAKQVKQLVDDGVQVAIVTGGGNFWRGRTSETIDRVKADQIGMLATVMNCIYVSDIFRYAGMKTEVFTPFVCGAFTTLFSKDAAVEALNEGKVVFFAGGTGHPYFSTDTGAVLRAIEIEADAMLLAKAIDGIYDSDPKVNPEAKKYDEISIQEIIDKKLMAVDLTASIMCLENKMPMLVFGLNEENSIVETMKGTFTGTKVTVMNERLKPFEEKMKKTIGNLDGELSAIRAGRANPNVLNKIMVDYYGTPTPIQQVANVSVPEARMIQIQPWEKKMVREIEKAIMTSDLGINPTNDGTTVRLLFPELTEDRRKELVKDVKKKGEAAKVAIRNIRRDGIDSVKKLKGSDVSEDEMKDMEDDLQKLTDKYVKEVDKAVEAKSKEVMTVMNVPQHVAIILDGNGRWAKAKGMPRNYGHAQGSKNVERICEEAWRMGIKYLTVYAFSTENWNRPDDEVNALMKLLRNYMKTCLKTAAKNDMKVRVIGDITRLDEDIQKRILELEEATKNNGGLNFQIAINYGSRDEMIRAIRKIAKDCVDGKVDPAEIKEETFEQYLDTKGIPDPDLMIRTSGELRLSNYLLWQLAYTEFYFTDVPWPDFSKEELEKAIETYNHRDRRYGGVKEEEEQNVMFKTRLLSGIVLVIILIATVGTGGGLLFGFLALISLIGLSELYKVVDVQNKILGLTGYLGAVVYYGILYTGQMQYVTLLTIAFLVVLMAVYVFSFPTFKAEQVMTVFFGVFYVAVMLSYVYQTRMLEDGAVAVWLIFLSSWGCDTCAYCAGMLLGKHKMAPKLSPKKSVEGGIGGIVGAALLGAIFAVAANKITGAGVNPAQYAVICGVGGMISQIGDLAASAIKRNHDIKDYGKLIPGHGGILDRFDSVIFTAPIIYYLATFLAGRLMKKIAILGSTGSIGTQTLEVVRENGDIEVLGLAAGSNIKMLEEQIREFHPQIVAVWSEEKADELRVNVADTDTKIVAGMDGLLEVATMKGTEILVTAVVGMIGIRPTIEAIKAGKDIALANKETLVTAGHIIMPLAKKMGVSILPVDSEHSAIFQSLQGNDHGALHKILLTASGGPFRGKKSEELMEIKVEDALKHPNWSMGRKITIDSSTMVNKGLEVIEAKWLFNVDVDQVQVVVQPQSIIHSMVEYVDGAIIAELGTPDMKLPIQYALYYPERRFLPGDRVDFWTLGKLEFEKPDTDTFYGLELAYEAGRKGGSLPTVFNAANELAVSQFLNREIKYLEITEIIEDCMKAHKNIKNPTLEQILETEAATYERINSRRMGIILAILLFSFIIFFHELGHFLLAKKNGIDVDEFAIGMGPAIYSKEYKGTKYAVRILPIGGFCAMGEDEEANDSPNNFNNKSVWARISVIAAGPVFNFILAFIFAVIITAMVGYDKPVIGAVESGYPAAEAGLKKGDEIVQMGNKKIHIFREVSFYNQFHSNEDVAVTVLRNGKEKTVTLTPKMDKELGYKRLGIGSSGYSKANLLTAFQYGGYEVKFWICTTVDSLKMLVTGQIGVNELSGPVGIVSTVDTTYKESRSYGVFAVVVQMLNMAILLSANLGVMNLLPLPALDGGRLVFLFVEAIRGKRVPFKAQGDSTLRGAVYGLYAKEDIVHPDGTTGVLYKQDSLIAQGVIGDDGTLEFSELYLGEMYVKEITPPEGYTLDTTKYEVSVTYEGQDVAEVTRDLTVKEQVKKQAFQLIKVSEDGEQTETDLVAGAGFKVYLISDLTQVKNGKLKENRYSGIPTIRMEMEKYNLRQPEFLDERGSFIVKLYKESKNDYEDMSNDEETNNLIVFCKTPRTRKEICDYLGLNSVTYAIQTYVNPLVEVGVIKLSIPDKPKSPKQLYYSGEREKVIKLSIPDKPKSPKQLYYSVEREEMNIQIFGIKKSFDSKKAERFFKERGIKYQFVDMKEKGLSKGEFNSVCQAVGGYEKLIDQECKDKDLLALITYLAEEDKAEKILENQKMIKTPIVRNGKQATVGYRPDVWKNWKMTYYNREDQFLRQRLQKEIPILRALIQNLYEELDRKLHLNGAKVPITFGYDTDTLGSYTRRSAHEKEHFHFSLLFIAYGVKNPLSKEDRIDLFKHEYAHYMQYNMQIPEKYKWQAGTHGSAWKYCCSLIGAAPTPYYKAGEALMNHDYDKVLKNRIHDKSVPVRDTYQQLKTAQKKKDEVVQYKLGDAVTHPKFGHGIVEKINQRSGGVHLHIRFDGEVKCIDQKWLSRKKYTMRKKSEMQKANEEFVKTYDDSKYPKPSVTADIVIFGMFDKEEDNYRKIAEKELKVLLIQRGAAPYEGCYALPGGFVGPKETIGEAAERELKEETNCNCNFLEQFGTYSNPDRDPRRWVISNGYMALVNAGQEIIQAGDDASDAKWFDVSFQEEAGIWNLCLTHGDEKLHARLEETTSKWDVKKKFKTIESDDLAFDHELILADAIVQLRKWITETHIAFRLLPEKFTLRELQQIHETVLDTKLLVPAFRRKVADLVEDTGEMTGDAGHRPAKLYREKRMMKFLFLILFIILEKRTFRAIVALPAGIVTAGYMEEINKDESLMEDKEKKQMLTTELTKEKSGRSAGMIQDMSINGIKLHLAQNGTGGPVIFWGMYPHQQNEVEHLWESLLELVPEQNFLLVAFQVEDWNRDFSPWEAAAVFGKEGFAGQGLKTLRWLTEECVPHIDRTFGVKDREHWLMGYSLAGLFALWAAYESDVFSGIVCCSGSLWFPDWDHYVRNHVIQSKCSVYLSLGGKEEKAKNKVMAAVGDRTRAQEGLLQEDSMVESVVLEWNAGGHFADAGKRLAKGVKWMFGVKSGLMNKADKAESLFRTGYNCSQSVYAAFAEELGITVEEAAKKASPFGAGFGKLREVCGAVTGMVMVIGDLYGYDDPKDAAGKKQLYVLVQKLCGSFEASEGSLICRELLGLEKGEDLEEPAVRTEAYYQSRPCVKACRRAAEILEEYVKEQKRKMSEYITTYTGKHFKPTEPDPELFDIADIAHALSLICRGNGHVKMFWSVGEHCICCAKEAKARGLSDRMVLACLLHDASECYMSDVPSPFKKELPEYNEREERMLSMIYEKFLGSDLTPEEKMQLNAIDKAMLWYDLTFLLGEKQESEAPELHIDLRYEVRAFGEVEEEYQRIFEEQLITVQNKRIMLHEVSFASYNGRDQVQGWIYVPACKPKGIVQVIHGFGEHSRRYLHMISAFMDAGYIVAADDHVGHGKTAMVNNVWGDWGDKGPHTMMEDEHTLKGIVCEKYPDLPYFLFGHSMGSFITRDFIAKYGDELAGATICGTTGIFRGAEETGKKLKEAIDAGHGEESDPSYTGELMGWMCERCGEVSIGNEWICADPYVQRDHADDPFDAFTRPTSNRSVYDFIQMMLQIEGTKWAEKVPTDMPIYNIAGDQDPVGEYGVGVYQVSNWLVQTGHNVTTKLYSGYRHEIHNYAEIKNEVEAGIIAFMDKALMRFPTGGKARGPRGMIRCDSGADSIVWMKEDDGTVILKDECSVMTDQEYMLRAIQLAKKGEGWTNPNPMVGAVIVKDGRIIGEGYHKKCGELHAERNAIASLTESAEGATIYVTLEPCCHYGKTPPCTEAIIEQKIKKVVIGSRDPNPKVAGKGAQILRESGITVVQDFMREECDRLNPVFFHYITTKTPYVVMKYAMTLDGKIATKTGASKWITGEPARQEVQHMRHRYMGIMAGIGTVLADDPMLNVRVEGWKSPVRIVCDSSLRIPLDSQIVRSAKEYRTIVAYAGREENEEITEKIEWLHAKGVDTVCCPDEKGQIDLKKLMTNLGNEGIDSILLEGGGTLNDSALRAGIVKEVHCFIAPKLFGGKNSKTPVQGIGIGLPSEALKLKCTDICRIGEDIRIICQVCEKEQEGPCLQESMFTGIVEEKGSVRYMQLTGESGVLAVKAKKVLERTKIGDSIAVNGVCLTVTSLQPDGFTADVMAETIRRSSLGSCKVGSQVNLERAMAADGRFGGHIVSGHIDGTGVIRSLTREENAIWVSIGTSPQILHLIVEKGSICIDGISLTVAKVEEEGFQVSVIPHTGEETTLLEKVPGDSVNLENDVIGKYVERLLGLGKSEEEKKESGITMEFLQEFGFMSQNNQYNTIEEALRDLREGKVILVTDDPDRENEGDLVCAAEFATQENINFMATYAKGLICTPMSAEIAARLNFPPMVAENTDNHSTAFTVAVDHVDTTTGISAAERSYTIMKCVDEDAKPEDFRRPGHVFPLIARKGGVLVRNGHTEATTDLVRLAGLKECGVCCEIMKEDGTMMRTPQLWELAKEHNLTFITIRDLQDYMRIHEKHVKEEAVADLPTQYGDFRLHGYINDITGEHHLALVKGDIGDGEDVLCRVHSECLTGDAFGSLRCDCGLQLQTAMRQVEAEGRGIILYMRQEGRGIGLLNKIKAYALQEQGYDTVEANVKLGFAPDLREYWIGAQILSDLGVKSLRLLTNNPDKVYGLGGFGLKINERVPLEIPPQKYDLKYMKTKQEKMGHIFKEIELMRQINLVEGKVVAPEGMKVGIVAARFNEIIVNKLLGGAVDGLVRHGVEEENITAAWVPGAFEIPLTAQKMAQSGKYDAVICVGAVIRGDTSHYDLVCNESAKGIAQVELATGIPVLFGVITTENIEQAIARAGSKAGNKGYDCALSAIEMVNLMKQLMVKTIIFDYDGTIHNTLGIYEPAFREAYQWLSEQNVVEEQKIETAQIAGWLGLNSKEMWDTFLPELDQKYKDQASAIVGDSMVRQIRKHRAVWYPGAEEMLTALKNRGYHLVILSNCKVAYRKAHWEEFRMERWFEQFYDCESYGFCPKTEIVQEVIRDYPGSYLVIGDRRQDLECARSCKSPFIGCLYGYGEKGELDGADYFVKSVEEITGIIMSGILMMIIAIVVLGGAYLLYGRYLQNKWGIDPNAKTPAYEMEDGVDYVPADTNVVFGHQFASIAGAGPINGPIQAAIFGWLPVLLWILIGGVFFGAVQDFASMYASVKNKGRTIGYIIEEYIGKLGKKLFLLFCWLFCILVVAAFADVVAGTFNGFSVSEAGKVTKIAANGAVATTSMIFILEAVGLGMFLKYTKFNKWINTAVAIVLLVAAIALGLHFPMYVGLDAWHLIIFVYILIASVAPVWALLQPRDYLNSYLLIFMIVGAVIGVFVANPSCNLQAFTSFNVDGQYMFPILFVTIACGAVSGFHSLVSSGTASKQIKNEKNMLPVSFGAMLMESMLAVIALIAVASFAKGEAAAQGLTTQPQIFAGAIANFLSVIGLPHSLVFTLINLAVSAFALTSLDSVARVGRLSFQEFFIDDDTDMDHLNPFMKVVTNKYFATIITLVLAYFLTKVGYAEIWPLFGSANQLLSVLALVACAVFLKKTKRQGCMLWIPMVFMMAVTFTALGMTIVKLTKAFLTTGLDLGNTLQLIFAVLLLILGVLVAIQGVKKLLEKTDDKKATAMKKKKVFALMMAATLALSLAGCGGSSSGDSKSSGSSDSSSVANKDKPLCWFNRQPSNSSTGELDKEALNFNKDTYYVGFDANQGAELQGEMVVDYIKANADKIDRNGDGVIGYVLAIGDIGHNDSIARTRGVRAALGTGVKDGDEVASKPAGTNVDGKAKVVQDAKIDVNGKEFTVRELASQEMKNSAGATWDAATAGNAIGTWEASFGDQIDIVVSNNDGMGMSMFNAWAKDNKVPTFGYDANSDAVAAIAEGYGGTISQHADVQAYLTLRVLRNALDGADVDTGIGTADDAGNCLKEGEDYRYSEEERSYYALNVAVTADNYKDFTDSTKIYDKVSKQLDSSKSPSKKVWLDIYNASDNFLSSTYQPLLENYDDLLNLKVDYIGGDGQTESNITNRLGNPNEYDAFAINMVKTDNASAYTSLLSKMTVDKNKYILSINGMSKSFGRNKVLKHINLNVKPGTIMGLMGENGAGKSTMMKCLFGTYQKDEGTIILDGREVNFSGPKDALENGVAMVHQELNQCLERSVVDNMFLGRYPKNSFGIVDEGRMKKETANLFRQLGITANLTQPMKKMSVSQRQMCEIAKAISYHSKVIVLDEPTSSLTAPEVEKLFKMMRQLKAQGISLIYISHKMDEIFNICDEISVLRDGSLVMTKECKDTDMNELISAMVGRSLDNRFPPVDNEPGEKILSVQNLSSKYAPKIQNVSFDIRKGEIFGFYGLVGAGRTELLETIFGIRTRAEGNVIYDGKIMNFSSPRDAMDHGFALITEERKANGLFLKGDITFNTTIANMNHYKNGAVLSHDRMVRATAEEIKIMHTKCMGPDDMITSLSGGNQQKVIFGKWLERSPSVFMMDDPTRGIDVGAKYEIYELIINMAKQGKTIIVVSSEMPEILGITNRIGVMSNGRLAGIVNTKETNQEELLRLSAKYLMAEKSIIISAEEEAILLKPIDEYVGKIQEQIDALRVEGSDKVNSLKNQIAIAKENKNLTKEEQNKIIGECKKNLEKAKATEDANKQQIAKLIADAEGFLSKHYNSEYYNIVAKSCEAEKKAENSNFEKLKADLQEEHKKAVSSLKDAEEIKAEKYTYKNKLYDAQMTHESRIQEIKDRKHDAYMHKFHLIDLLRMSKYTFAQKQAQNFENYKYTFNMTQFLYKNGLYIVIIMIFIALCIITPFVKNTQLFTTTNILNILQQASPRMFLALGVAGLILLTGTDLSVGRMVGMGMVTATIIMHNGINTGTVFGHVFDFSGMAPASRAILALCVCILFTTVFAMTAGFFMARFKMHPFISTMANMLIIFGLVTYATKGVSFGAIDPTIPNIFIPQAGRFPMIILWAVVAIAVVWFIWNKTTFGKNLYAVGGNPEAAAVSGISVFKVTMGAFILAGILYGFGSWLECVRMVGSGSAAYGQGWDMDAIAACVVGGVSFTGGIGKISGVVTGVLIFTSLTYSLTVLGIDTNLQFIFEGIIILAAVTLDCLKYVQKKMSKKILKADFVFGYVIRDVNLLYWNKCIAAMKKGKKMERYKVILVDDEAEVIDMIEKKIHWNDLGFEVAGSATNGVKALELVEKLQPDVVLTDIKMPYMDGLELSRRLNREYPNIYIMLCTGFDEFEYAKEAVHLEIKEYMLKPVNATELSESLTNLKHTLDREREEKLNVKKLNDYFQEVLPKLQSNFFISLIEGRVEKKDYERFLQAYQVDMKGPLFGCVIFHTSENHVPEGMNPLLLSMSVEREIKQRLMDQWNCREFIYMGNTLLILELDAEDKITQITDACDRFCRWAYRIMGAVVTAGIGTVCDSLYEISLSYERAREAVSYRVLYGTKRAINIGEIVPKEQIKPVQSEESRMQTLFRAIRIGDSAEIERAAHGEMEKLHKNTETMSQYNLATMEIVSGFFKFCTDNSLDFNKISGNMQNIYEKVSQMDESSLTAWIVQMSETISEKLKCARNSSARRLIVEAQSIVQERYMEADISLDEVCAVLGVSNSYFSSVFKKEAGKSFISYLTDYRMDIAAEMILNTDEKSYTIAEKVGYLDANYFSYVFKKKFGVSPSKYRASVKMKGTGKRVKKRKKDSDLKENVVFNIQSIIMSVLMAITLVTIVTMGFLLYQRFKLAIDKMAVSNTEATVESTVDRVNSDLLDIRQIFDAANYNIVQEFDISSEKFAEQFSLLYEVNSDKIESLALYGNEGRLIASEPVAVEKENIDVKGQDWYKNAESAIENVHFSIPHIQNLYEDGLYRYHWVVSLSRYVDINDGEIPGSGVLLVDMKYSVIEDVLKQINDSSEGIYYYMISRDGQMIYHPRKTEMARGLFEENSLKASGYEEGTYEITTNGHKESVVVGNIAYTGWKLIGVVPESVQTARINNFRYYIFTTIMILMMMLLEGNRLISRKISKPIRKLDESVKTYEAGGKTDIYIGGSSEIRHLGYSVQRSYERIETLMGEIIRQQNERRKSELDALQSQINPHFLYNTLESITWMIEAQKNEEAVIMISELAKLLRVSLSRGKTIIPVKDELQHSRSYMNIQLMRYKERFQMEFQTDKEIEDYCIVKLVIQPILENAIYYGVGNMDEDDEGKITVRGEKKEDDIYIIIEDNGMGMRKEVLENILKDNNKVPKHGSGVGVINVHSRIQLMFGEQYGLEIYSEPDEGTRVVIHIPAIPYTKENAEQLEMQKYIQGRDVDEKEMKKNKITFLILECIFLILTLFFAWKIFDRDVPEKRVAVILPESGDNRWNSLIKGMKQSAKINNLHMIICNTDEIENAEMEKEIIKEQKHNNIDAFIICPAPGSDTKDMLKKQCAKTPYTLIMEDVYSKEGGNSGNPVIGPDYYKMGSELGKQLGEKRQKIGVVTNWKESKSDQDAIRGLKDSLKDSKSEIDWYCYRKKDQNIYEKVSKKDKVDAIVVLDPHALEELGEQSDEDSYQGADIYGIGSSVKAVVLLDNGNIQGLVVPDAYEIGYKSVGEMAQKLEHRFYRLKGHKTEIKVFDRDEFSLNDNLERFLYSYEMIAVILLIAFLITGCEDKSVKTDHIIRIGVVTYTQDDPFINAMTDQLKENLKKMETDHMKIITTVKNGDDNQQDQNEIVEEMIDAGCDVLCVNLVDRTAPSRIIRMAKQEDIPVLFFNREPVREDLMQWEKLYYIGCNAEQSGIMQGEIVADYIKNHPEVDKNQDGKIQYILLEGEAGHQDAISRTDYSVKTLLEQGINLEKLSYQFADWNRGQAENRMSRLIEQYGDEIELVISNNDEMALGAVEAWQKAGYDCRNWPVIFGIDGLDDALEAIKTGKMKGTVYNDKEDQAMELAKLSVEIVCGKDTNRKHLKEGRYYVSEYCRVDSSNVDHFLKMDNAWIIAFYKETDPVKRLELLKANTGDGESEKDKYRKQLWIARYGKRTPVKDEFMRCLMEMKYLAEGTTVDLGGKRRKQGAKIAATLGLSESLLQEKVYKEILLQELQNVFLKFIEVSRGGRAFTSLVFGMGQMSEEGVTKKIAQQISMIAFHAPHLLHMEKEFALLQEAALEAFRKVYPNREHFLKKMNIEIKNSNYTTQEKLQILADAAKYDVACTSSGSSRRGKKGELGNTEACGICHSFAADGRCISLLKILMTNHCAYDCKYCINRASNDVKRATFTPEEICELTIEFYKRNYIEGLFLSSGVLKNPTYTMEKMCETLLLLRTKYHFNGYIHVKTIPGASDELLAAAGYLADRISVNLELPTEEGLRTLAPNKTMKTILNPMGKVQNTIAAHRMAIGKTAYMERSKGNQLLDNGIFSEISKRNYRESLEEKKKTDRLSDGKDGTLPSQKEMGRVDGLLTWDNAYQLAPHDMSGLKRRFAPAGQSTQMIIGATGESDYTLLQTTQQLYQGFDLKRVFYSAYIPLNEDDALPGLGTPTPLLREHRLYQADWLLRFYGFQAGELLSEEKPDFNELIDPKCDWALRHLEQFPVEIETASYARLLRVPGIGPKSASRITHARQYGRLDFASLKKMGVVLKRAHYFITCGGKQMYHTPVEASYIMRQLVSVDKKDVWNIEHSNESYVQLSLADFGIGMTCIYDAWSEALRIGHDQIQLKKEPILQQTMFDEYVHVDGDNVKAEKVIRSVRRDISDEAYLDVYYATLSAEEDALQAIYNFLRVGFAVGSKVLEQYSNPHVMRMLELRRKVGNESHHFNEFARFQSLDRKVYVSHLEPKSDVIMLVGRHFADRMPSEHWMIIDDNRKTACVHPKDGTNYLRYLTDDEFESLHKTEQYEDEYTEMWKTFFQAVAIKERENYVCQRNLFPIWKRKHAVEFRTLRIMQQNLKVLMLNGSPRANGNTSVALKEMEQVFKDNGIETEIILVGNKDIRGCIACGSCYEKGKCVFNDMVNELALKFEEADGLVVASPVYYASANATLIACLDRLFYSSHFDKTMKVGASVVCARRGGCSATFDELNKYFTISGMPVASSQYWNSIHGRMPGESEQDGEGKQTMRTLARNMTFLMKSIALGKEQFGLPEKEERIATHFIRMTDTHISERYEFRNIKQNEAEEAAEIERICFPPNEACSKKHMKDRVAGIADLFLVVIDKENGKMAGFLNGLATDEVVLKDEFFTDAGLHNPEGKNIMLLGLDVLPEYRSQGLARELVRRYLEREWGRGRKEIILTCLESKVAMYEKFGFKDKGIAQSTWGGEEWHEMSVRIMMNKLQQYFPMIRTKEEVLKEIENNSKLKEIYENWQEDEREEFLAFVTGTKGVKMMYDFISKAILNPEIYEERVEEFLSLLLQQKVKILEVLPNEETGLSDGYSILIMDIVVELENGSIVNLEIQKNGYMFPGERSACYSADLLLRQYRRVRKKNKQEGKKTKSCYRDIKDVYTIVLFETSPSQLHKFRDVYLHHFEQKSDTGAEMNLLQKYLFVTLDNFRSIKHNKSSKMIINNRLEAWLAFMCMDEPDDILSIIEKYSDFKEMYEQIYVICRDLDEVMGMFSKELQELDRNSVELMVDEMQKDLDKTREELEESKMEIEEKDQQLKENKLQLKKMQEELEHWKKMYQQENKMRKIVNINTTSTKEEQLKDLITSIQQVKDSLVNILDEYEEAGEVDKADTLTEALDALEDAYDVVNDVLLDDMELRDKIAGALYGMALGDAMGMPAELWGRERARKFFGGKITGFIDGPKENDVAFNYDKAQFTDDTGQALVLLDSLKATDYKPDAADIAKRMLEWAEKENAFENNILGPTSKVALANFRDGVDASAITNKALSNGSSMRIAPIGCLFTPDQRTELIDYVYGVSQATHTSDVTIAGAAMIAEGVASAIVNNDFEQVLSDILSVEEAGYEKGCETFSPRLAERVKIGVQIAKEYADDADTFSKKIYDVIGSGVGIIESVPAAISIAYYTQDPNECCLMCANLGGDTDTIGAMATAICGAFTGYSKINPEYTELLRVQNSETDFDEYINILKKGRELAGCGRMRTLVVGAAIVDLMMKIDRLPKSGEDIPCRETKTVVGGCAYNVANTLRNLHCEHDLCVPVGTGSFADIIRRGMKEKGYEPVIEEPSEDNGYCLSLVEADGERTFITVQGAECHFKKEWFDRIDMSRYENIYIAGYQVCGNSGKIIADWLQNVPDIDKKKIFFAPGPMITEIEPETMEKLMALSPVLHINEAEAGNYTGQEHVEDAVKDIFAKSQNTVFVTLGGDGTMFYDGDEIQKVASFKTEVVDTVGAGDSHIGAVIAGLSKGMEVKAAVRLANHVAAAVVGTSGPVMDYEEFQKISEEWENEMNKIKNFFADWSWKEKAWLAFVLIVQTVAWGIQKESAFMLIMTLTSSLNLVLGAKGKVAGLYFAIINSALYAINCMGIPLYGEVMYNLIYSIPVSAIAIFTWKKNMTKGGEVKFRTMTPKIMVTTAVVTLVGVLGYMQILKWMGGNLPFMDSLTTVVSVVASFLYLLRFSEQWAMWAIVNALSIVMWIMVFMQGDSSALLIIIMKSINFINSTYGFLNWRKIAKENAQMHNRGTQVEFNMTKYEVIKNEIKEQIEDNILKPNQVIASENEMCRHYDVSRVTVRKAIDELCAEGILYRIKGKGCFVRELKDQKRSHIYSFTEAVKNEGKTPSKKQLSLKTMNADAYLAEKLQITEGDEVYEIRSLYYADGVPYSLNTAVLPAERFPKLDFFDFNNRSLYEVLGSFFHTEMYRVRQTLEAVTADKEIAQMLERKESQPLLKIKAVSYSLEENREIPVEYYEAYILTEIQNYYVEKFTVMKSFYEWYRKHITGAIFVGLILGILTGLFLAGRFNVVLTATSVLGSIYMSALNMMIFPLVFCSIVMGIASIGSAKTTGKITGAAMLFFLCTTAIASFVGLIIPRLICLGKGVSFKMATSDIQATKMDSILDTIKGLIPSNPVSAFAEGNMLQVLVFALIMGFTLIAIGEKGEPLLKVIDSCNEACLKIISTVMYFTPIGVFCTIVPVVEANGTKTIVSLATQLIILYVAFFGFAFIVYGGTVSILGKTSPVKFFKAIMPAALNAFGTCSSSATIPLSKSCVEDKLGVPNQISSITIPLGATVNMDAVSILMSFMIMFFANACGVHVSISMMIIILLANVLLSVGTPGIPGGAIASFAALATMAGLPAGVMGVYISINTLCDMGATCVNVIGDMAGCVVLKEKIEIEKMSQMQISEKQNILTRTWVVAALACVCCILWGSAIPVIKTGYQILAVDSADTASQIVFAGIRFALAGILVLLFASIREKRVVLPDGKIFKYAIPVCFAQTFVQYFFFYIGVAHTSGVKGGIITGLGNFIAILMACLLVRNEKMTGRKLAGCILGFAGVVIINMAGGSMDMGFRLTGEGFVLIAQLSYGASTVLINIFSKKVSPVILSGCQFFMGGVLLFIVGILMGGHLDHMSIAGVVLILYLAMVSAVAYTLWSVLLAHNEVSKVAIFGFVNPLCSVVLSALVLGEVSQAFNARSLIALILVCVGIYIVNCKSKKMSERGSAPAAENKMGTMPVGKLVFNMSLPMMVSMLVQALYNIVDSIFVAKLSENALTAVSLAFPLQTLLIAVATGTGVGMNALLSKSLGEHNFKKANKIADNTAFIYAISYIVFLILGFTIVRPFYASQIGNADVEIMELGIDYLSTVMIFSFGLFTQIFFERLLTSTGRTIFSMTSQLCGAITNIILDPIMIFGLLGFPKMGVTGAAVATVIGQCVAGIVAGTCNHKYNHDVSLSFKGFRPDIRLIGHIYAVGIPSIIMQSIGSIMTYSMNRILIEFSSTATAVFGVYFKLQSFFFMPVFGLNNGITPIIAYNYGAQQRNRMIKTIRISLTTAFCLTFIGFLCFEGIPQVLLGMFNASDAMLKIGVPALRIIGIHYLIAWFCIIAGTVFQALGKAVFSMIVSIMRQLVVLIPSAYILSKIGGLHIVWWAFPIAEVISFIVSTAFLIKIYKTIISKIPEGKLMKIVFLDAKTIGDDIDLSGFDSLGEVTKYNFTTPEEAPERVKDADVLIINKVPINENTVGTAKNLKLVCVTATGTNNLDKDYLDSHKIAWRNVAGYSTETVTQHTFAMLFYLLEKLRYYDDYVKDGNYINDTSFTHFAEHFSEINGKTWGIIGLGAIGRRVAQIARAFGANVIYYSASGRPAQDGYTQVDFDTLLTTSDIISVHAPLNEHTENLLDKCAFAKMKETCIFLNLGRGPIVVEQDLYDALVNGEIAAAGLDVLSAEPMSEKNPLIKIQDSRRLFITPHIAWASVEARTRLMQIILDQVKEYFHMMLLFKSFTILIIGFVLLIKGADFFVEGSSAVAKRLRIPSMIIGMTIVAMGTSLPECAVSVTASLTGNNSLAISNAVGSNIFNLLVVCGVCSLFVPLAVQKSTLQKEFPLSIFCAGLLLLLGYLGMTLGRIDGIIFLIIFAGYLLWMIRSAKRARHNITSADSSSAQKVRSSLSEKEIEEVASHINLLPLWKCLIFILGGMIAIKYGGDFVVDGASSIASSLGLSQTLIGLTIIAMGTSLPELVTSIVASRKDEVDMALGNVIGSNIFNILFVLGVAAAISPVGFALENIIDIAFLIIISAITLVFAWTSKEINRKEGIIMLVLYAAYMVYICMRMLSMIIDNISSFMYSKLLVIILIGAGVYFTIRTSFPQVRLFHSACKAVMKKPDDEDAVSSFQALMVSTASRVGTGNIVGVSSAICIGVYMSSGVAPSEALQGAPWVQAALQESLGTFGSVFITVSMVLFAFTTLLGNCFYCDNLLTFCLIRQMKALKDYERQLKMGMNPVFKSKDIGMKEKLDCWKMYYVPDGTKECGYYECRKCGNRFLSLQTMKHIPCPDCEQEIDYEIGPDESLEDVLDTAELLQKIEGEEEVEKMDALLSLAITGGDCNWIMNTLVIVLIAAVLLSAAYVLYGRWLANKWGIDPKAETPAKKFEDGKRQYQVLYVPLLHWHLPVWTPLHVSDMPISGHCSDLPTSYCPHWMMTELEKYYNKFNEEKRLGSRHGQVEFTTSMKYIHEYLPEDKSAKILDVGAGTGRYSVALAEEGYDVTAVELVKYNLGILKKKNSSVKAYQGNAMKLSRFPNKEFDLVLVFGPMYHLYSMEDKVKALTEARRVLKDDGVILVAYCMNEYSVLTYGFKQNHILECIENGKIDDNFRVQPKPEDLYDYVRLEDMDAYNKAAGLERIKVISADGPSDYMRPVLNAMDEETFETFIRYHLSVCERPELVGAGSHTVDILKKSIIMNNTESINEKIIQNMIEITDFDAPELDVYARLTEAQLLNKDHPEDGLFIAESPKVISRALDGGYEPVSVLVEKKQVLEDAETIAVLGKCGNVPVYTAEFEVLTKLTGFKLTRGMLCAMKRRRLPGLQEICNGCDRIAVLENVMNPTNVGAIFRSAAALHMDAVILTGGCSNPLYRRASRVSMGTVFQIPWTFVDNSVIWPEEGMKILRELGFKTAAMALKEDSASIDDPELMKEDKLAVILGTEGDGLAPETIADCDYTVMIPMSHGVDSLNVAAASAVAFWQLGKRMYITCLDVEGVLVPEIWIAFAEESGIPELKRTTRDEPDYNKLMRWRLDILKQHGLGIKEIQETIAKIDPLPGAKEFLDELRSFSQVILISDTFTEFAQPLMEKLGRPTLFCNSLEIADNGEITDFKMRVENSKLSTVKALQSIGFDTIASGDSYNDLGMIQAGKAGFLFRTTEKIKEDYPEIPAYETYEELLGAIKSVISIMWNYEKRLQYPVKITQTNPKIAQIILTQFGGPDGELAASMRYLAQRYTMPYKEVTGILTDIGTEELAHLEIICAIVHQLTRNLTPEQIEKSGFDKYYVDHTLALWPQAASGTPWSATTFQSKGDPITDLHEDMAAEQKARTTYDNILRLVKDPEVCDPIRFLREREIVHYQRFGESLRIVQDKLDSKNFYAFNPEFDRKPCCNMNENRPCKKELLEWINIVSFAVDDVKLFLDTHPNCTEALDFFDEFKKQRVQALKEYAKYYGPLTLDTATTQMDYWKWINDPWPWQEGGCMPNYRYNTPDYMRQNNSNGCHVGGSRTMPASVSPSTPSRSCCNIHEHDKLSGLPIAMAYVPWQEWRSLYEVEKGFRCGTIFAELNLPFCWKGGAARMVKEVNKEHKNVKMTRKKKRSGIVYFDYSLLAILICLVCFGLVMLYSTSSYSAMMKQNGDSLFYFKRQLLFCIVGFIGMWLVSKIDYHWYINKSKLFYFFSIFMMFLVKTPLGKEVNGAKRWIKLPFGQQLQPAEITKIAVILFIPALICTMGKEIKPWKGVIRVLAWGGFSAAVVYLITDNLSTAIIVMGITCITIFVVHPKTKIFVGIAGVGIVLAIAGARILGTMMETSGSFRLRRILVWLNPEKYASEGGYQIMQALYAIGSGGFFGKGLGNSAQKMIIPEVQNDMILSIICEELGVFGAIMVLILFGMLLYRLLFIAQNAPDLYGSLIVTGIFAHIALQVILNVMVVINCIPTTGITLPFISYGGTSVLFLMAEMGLALGVSARIKIAEMSYKVIIDSCGELTEEMKKSGHFETASLQIDVDGHHIVDDESFDQADFLRRVKASGECPKSSCPSPERYMEEYHCDAEHVYAVTLSAELSGSYNSAVLGKNLYEEEYGEKDIYVFNSRSASVGETLIGLKIAECEEKGMSFQEVIETVESYIEEQHTYFVLETLDILKKNGRLKGLKAVVATALNIKPVMGSTPEGSIQQLSQARGIKKGLAKMVDEVAANMKNTQEKILAISHCNCEERAKAVRDMLLERASFKDVIILDTAGISSMYAADGGVIVVVMSQAKVDRYKDEKKNRKKNMKKEKVQNIIRRCAVCVIAVALIGCAGYSVHNIYESKKPTEKVTVDYSAMTTLSQSLAGNSDTTAEMLKGEYSHNIDAKGRLIIPAKFRDDLGEHFVITKGMENCLYVYPEAEWTAFEEKLNALPTTTDKKARAFAYFFQGSAADGDLDKQGRTLIPSVLRTFAHLDKEVVFIGMGKRAEIWDKARWDEKNAEVELNIEDIASDMEESGFSIMGFEHKSVLLNETIEGLNIKPDGIYVDGTLGGGGHAYEVCRRLGEKGSIIGIDQDEAAIEAASVRLKDFGEKVTIIRSNYCDMKSKLHELGIDKVDGIVLDLGVSSYQLDTAERGFSYREDAPLDMRMDRRQKMTARDIVNDYSEMDLYRVIRDYGEDKFAKNIAKHIVAARGINPIETTGQLTEIIRASIPMKYQKKSGHPAKRTFQAIRIELNRELDVLKNSLDDMIEILNPGGRLCIITFHSLEDRIVKSAFKKNENPCTCPPDFPVCVCGKVSKGCVVTRKPILPSEEELEYNSRSKSAKLRIFERRMAARKSYASDRRQSGGYSSARSKAGQAYMYGNVVAKPEYEPKKNRSSVKRRKKVSRQVQKNRNRALHMNAAYVVFLAIAATIVLLLCVNYVRLQSEVTKHSKNVTALQEELADLKEENTTKYNAVVDSVNLDVIREKAINQLGMTYATPDQIVEYDNPASDYVKQYENIPENGVLAQSDKNKKMARKKTNFFKKKISGLMQKKLVMLFGAIILAFVFLIGWITYINASKGEKYTKVVLDQQQYNNRTIPFKRGDIVDRNGTKLATSERVYNVVVDAKTITSNKKYINPTIKALSKCFDLKKKDVRKQIKKNPNSRYLVLKKGVNYEAYQKFEKITSDTDKNPNVQGVWMEEDYTRKYPYKTLASDVIGFTTNGNVGSNGIEASYNSILNGTDGREYGYLDEDSGYERTVKEPDNGSTVVSTIDLQVQSIVEQXXXXXXXXXXXXXXXXXXXXXXXXXXXXXXXXXXXXXXXXXXXXXXXXXXXMNPQNGEILAEASYPNYDLNNPRDLTKYYTEEQLKKMTDQEKLDTLNDLWNNYCVSNTYEPGSTFKPFTISAGLETGVLTGNENYVCGGVMHVGDHDIHCSNRSGHGPETLKQALENSCNVALMQIGASIGTEEFCRYQRLFGFGEYTGIDLPGEGETSGLLYTPATMDPASLATNAFGQNFNVTMTQMAASFSSLINGGNYYEPHVVKQIQDDNGNVTENKDPVLVKKTISKETSDIIKDYMLGVVEEGTGASAAVEGYAVGGKTGTAEKLPRGNGKYLVSFIGYAPQENPQVMVYVVIDEPNSAVQANSGYATQLASQIMTDIFPYLGIEKKTDSASNTDTQTTQTAQQMKNKTFHKKKILVVFLAAFILILYLIGRLVYLMVFDAEYYQQKAEDLHERERDIKAARGEIIDRNGTVLATNRTVCTISVIHSQIENPEKVIEKLSEFLEMDADQVRKKVEKISSIERLRSNVDKRTGDKIRNLGLAGVKVDEDFKRYYPYNELASKVLGFTGGDNQGIVGLEVKYEKYLKGINGKILTTTDARGIELDGVAEDRLEPEAGNTLRISLDYTMQKYALQMAEKVRTEKQADKVGIILMNPQNGEIYAMVNVPEFDLNQPFMLNNEETGENLTDEQRQDALNQMWRNGCINDTYEPGSTFKIITASAGLEEGAVHLTDQFSCPGYKVVEDRRIRCHKVGGHGAENFVQGIQNSCNPVFIEVGLRIGVDRFFDYFRQFGLMDLTGVDIPGEAGTIMHKKENVGQVELATISFGQSFQITPIQLATTVSALVNGGRRVTPHFGMEVLSEEGKKVKTFRYNAKKHIVSEKTSQTMRELLESVVAEGSGKNAYVEGYRIGGKTATSQTLPRSANKYISSFVGFAPADDPQILGMCVIYNPQGVYYGGTIAAPVIGKIFENILPYLGIEKQMDYKVFIPVLISFVLSVILGPLVIPVLRRLKMDQTEREDGVQSHLKKTGTPTMGGVMILLAVVITSVIYIGRYPKIIPILFLTLGFGLIGFLDDYLKVVMKRSDGLYPKQKMALQIVVTAIFAFYMVKFAGVSLTMLIPFTGGKYLDIGWVAIPLMFFVVIGTVNGVNFTDGLDGLASSVTVLVATFFTVVAIGTKSGIEPITCAVVGALLGFLLFNVYPASVFMGDTGSLALGGFVASAAYMLQMPIFIIIVGFIYLIEVLSVMIQVTYFKKTGGKRIFKMAPIHHHFELCGWSETRVVAVFSIITAILCLIALMAMMEVKGKKVLVFGLGISGIGAGQILERHGAEVIMYDGNQKLTEEKIKKQLGEDSSAKIVIGDFPEEVLEKLDMTVLSPGVPTDLPVIEKMREQGITVIGEVELAYQFGKGDVLAITGTNGKTTTTTLLGEIMKNYQEDVFVVGNIGTPYTTAVEKMTDNTITVAEMSSFQLESIVDFRPRVSAILNFTPDHLNRHHTMEAYVNAKKNIAKNQTEDDYCILNYEDRLTREFGEEIKANVLYFSSQRKLEEGIYLEEGNIIYNYGRVKETICHVDELQILGTHNHENVMAACAMAAVYGVPVDVIRESVKAFKGVEHRIEYVTEKKGVTYYNDSKGTNPDAAIKAIQAMKRPTVLIGGGYDKGSEYTEWINSFDGKVKKLILLGDTKEKIAADAEKCGFKDYMFVDSFEEAVLTAAKIAESGEAVLLSPACASWDMFPSYEVRGEKFKEIVNSLMERSKQRAYDYALVIVLGIIIVTGLVILYSTSAYNGKLKFQDSFYYLKKQIFATLLGIAGMWIIARVDYHVWKKWSVPGYLVSVLLGIAVLLIGDEYNGSKRWLSLGPFSFQPSEFAKVAVILFLTYVIMRNVKSMGKFTTVCKIVVSVLPVVGLVGASNLSTAIIILGIAVVLVFVASPKYGQFAWMIFLGCAFMGIFLAMESYRLERLQIWRHPENYEKGYQTLQGLYAIGSGGLFGKGFGSSIQKLGFVPEAQNDMIFSIICEELGLVGASFVLLLFLILIWRFFVIASHAPDLEGALIASGAMAHMMIQVILNIAVVTNTIPNTGITLPFISYGGTSVMFLLFEMGLVLNVSSLVKMGNQNQKREGTKKKRKDKKKKHHAYALIVLILAAAIIILGTVLLFYIQEVEVSGNEYCDSQEIVECVQNDKLSKNSLYVLAKYSLGQGKKPECLDTLKVSMKNPWTLKITVKEKTRVGCVKSGKKYSYFDQTELVVNETEVKDSKIPVVSGLKIKKNKLYSQIKTTNQTKFSEIVEACGESQRYGIYPEKIYVKDQQIYMDFGNVRACLGNQVSAEQIAQIRPILKKLGDKTGILHLESYSENNTTITFEMEDISQENMLEIKTNESEAAAKIIVVGVGGGGNNAVNRMIDEQIAGVEFIAVNTDKQALQLCKAPTLMQIGDKITKGLGAGARPEIGEKAAEESAEEISAALKGADMVFVTCGMGGGTGTGATPVIARIAKEQGALTVGVVTKPFRFESKTRMNNALAGIEKLKESVDTLIVIPNDKLLEIVDRRTTMPEALKKADEVLQQGIQGITDLINVPSLINLDFADVQTVMTDKGIAHIGIGQGRGDDKALEAVKQAVASPLLETTIAGASHVIINVSGDITLMDAADAAEYVQELAGEDANIIFGAMYDDSRADEATITVIATGLHNVGGSASKLKSRLENQGRSSAMPHGQQGHASAYERPTRQNNTMYTQQQTVRTQQAERPVSPRLDFGTTTQRENGGTTARRPIGGTTPTLDTPRTPTSKVKEQSIKIPDFFKKMNLKCAQFFLFFFFSFLNALLFTKAVERKPAYHTSYDKILSIKSIMYYELYVDVFFLMNFTMDTILLALLKKALACPVRYGRIIAGGVLGAVLTCVVVIWPCKTTWAKFIVFHGVINVLMLRTGLGLKWGRELFRGWVILYIESFLLGGVLQFAGQYLRQGSVFFALAVISYYVVLGIWKIILLFSEKGNRYCEVVVFFGERNCRLRALIDTGNTLKDTVSKDPVSVMDQASVKRLTEGKQPERFRYIPYHSIGKKEGVMPAFRMDKIQIIRNGYRINVEHPLVAVCEEELGSENYQMIINPDILAGGKKNGDKSSSSTSVMVIKVAVPHQFKLKVIPDLKTLFFVDRKDIHYIGGSDILPAPLEAAAEKKAIKDLGTEKDENARKILIEHNLRLVVYIAKKFDNTGVGVEDLISIGTIGLIKAINTFNPDKNIKLATYASRCIENEILMYLRRNNKTRMEVSIDEPLNVDWDGNELLLSDILGTEEDAIYKDLENEAEKKVLIRAIGRLSGREQMIIRMRFGLGTEDGEEKTQKEVADMLGISQSYISRLEKKIMQRLRREMVKYSMRLSFFGAAHEVTGSCHLLEACGKNILIDCGMEQGPDLYENQELPVTPGEVDYILLTHAHIDHSGNIPLLVKKGFSGEIITTFATADLCDIMLRDSAHIQEFEAEWRNRKARRSGEPEYEPIYTVADADAATKLLVPVDYGQKITLCDGIEVRFNDVGHLLGSASIEVWVTEGEVSKKIVFSGDVGNKNQPIIKDPQLVKEADYVVIESTYGDRTHGEDIPDYVGEFTRILRETFQKGGNVVIPSFAVGRTQEILYFIREIKEKNLLPEFPGFEVYVDSPLAIEATNVFNKNVKGCFDEDAMALVNQGINPLLFQGLKTTITSDESRQINFDTKPKVILSASGMCEAGRIRHHLKHNLWRPECTICFVGYQAVGTLGRKLIEGAQSVKLFGENITVNAKIEVLRGISGHADMNGLLDWLAGFEKVPDRVMVVHGEDTVTDHFAALVEEQFGCPAFAPYSGGSVDLATNEIITIGQKIPKKAEEKPNKIKSASAFNRLVAAAKRLLNVVYKNEGIANKDMAKFETQIQNLADKWDRMAQGKVEICGVNTAKLPILNEKEKEALFVRIKAGDQEAKEEYIKGNLRLVLSVIRRFGASGENPDDLFQIGCIGLIKAINNFNTELEVKFSTYAVPMIIGEIRRYMRDNNSIRVSRSLRDTAYKAIYAKENYMKKNQKEPTVQEIAEEIGISKEDIVFALDAIQVPMSLQEPVYNDGGDALYVMDQLSDQTNKEEKWIEDLSLEEAMKHLGERERYIIKLRFFQGKTQMEVADEIQISQAQVSRLEKNALKTMRQYLIMKACIFDLDGTLTNTLESMTYSVNLTLKEMGLSQITKDQCRMFVGNGARVLIEESLKVSGDPKASRIEEGMKIYGRIFDQNCTYHVTLYEGIPEMLKALKDRGIHLAVLSNKPDRQTVKVVKEIFGDNIFDYAQGQKDGIRRKPEPDGVWYLMEQMQVSKEECLYIGDSEVDAATGKNAGLKTIGVLWGFRDRKTLETAGADHLIERPEELLQFVMYEYDEECLKTFILNQGQLFDEPVAETLEEAEAFLEDCMASIVDSIEEVKEFLDQEGMDISGMSDEEIEEASEVFALPDGRYLIVEGMSSKTKIVVLHMKEIIYTVIFAVLAIVLILLLIFMFRPGHHSGSNDKKIYTPGIYTSDITLNNTALEVEVTVDETHINSIRFTNLNDSITTMYPFIEPAIEDIAEQVYKKQSLENIQYSSDTPYTSQLIVQAIENALKKAETTKMFIIAGLGNPTLQYEGTRHNVGFDVIDMLADRYNISVDGRKGRALVGKGIIEGQKVLLVKPQTYMNLSGESLRELVNYYKIDEEHELLVIYDDISLDVGQLRIRKKGSAGGHNGIKNIIANLGTDVFPRIKIGVGEKPKKYDLADYVLGHFSKEDRELMEEGYDRADHAVGMILNGEIEAAMNQYNRKVKPKEAMQGLIGPLKELAEFEELCKNKKKDVGMIRVCGCVNSQKSHMMYALGDGCKYKVIACSSETKAKQIYEEYRFLDSNTYLYPAKDFLFYQADIRSKELVKQRMEGIQAVLSGEPVTVVTSLDGFMDHLAPKESIAEKVLKVQNDSVLKLDEMAEKLSVIGYDREVQVEGPGQFAVRGGILDIYPLTEELPVRIELWGDEVDSIRTFDVESQRSIENLMDIVIYPAVEFPQNGEKGVSFLDYFPPEDTILFLDEPVRLVERGQNIEDEFMEAQKKRLESGYDLEEEEAKIFPVTEILKKINCYSSIGFYALGMKCKGLEVRESYEIQAKSVNPYNNSFEMLTQDLKRLKRNGYRVILLSGSRTRAKRLAEDLRDYNLSSYYSEDLDREVKPGEIMTAYGYIAEGYEYPMLKFTVIAESDIFGKRKKKKKRKTYEGRKIQSFSELKPGDYVVHENHGVGVYQGIEKIVVDKISKDYMKISYAQGGNLYIPATQLDLIQKYASADAKKPKLNKLGTQEWNRTKTKVRGAVKEIARDLVKLYAARQEQDGYVYGEDTVWQREFEEMFPFEETEDQMMAIEAVKKDMESHKIMDRLVCGDVGFGKTEVAIRAAFKAVQESKQVVYLVPTTILAQQHYRTFVQRMKDFPVRIDLMCRFRTPAQQKKTVEDAKKGLVDIIIGTHRVLSEDMKFKDLGLLIIDEEQRFGVQHKEKIKKLKENVDVLTLTATPIPRTLHMSLIGIRDMSVLEEAPNDRMPIQTYVMEYNDEMVREAIERECARQGQVYYVYNRVEDIDEVAGHVQKLVPDLTVAYAHGQMREHELERIMYDFINGEIDVLVSTTIIETGLDISNANTMIIHDADRLGLSQLYQLRGRVGRSNRMAYAFLLYRRDKMLKEVAEKRLAAIREFTDLGSGFKIAMRDLEIRGAGNLLGAEQHGHMEAVGYDLYCKMLNEAVKQLKGEMEEEETFTTTMDLNVDAFIPASYIPNEYQKLDVYKRIAAIENREEMEDMTEELIDRFGDIPKKVEKLLEVAALKAQAHQLYVTAVEQKGEVYTFTMYEKAKVHPERIPKLIEDFRGELTFKADGVQPCFIYEKKRRNLKEKQTDALESTKNVLNGLKRLIGEEKSGIIDPLSKMKKRALILALAGIMAASLIGCGSLKDDAVVVKAGDEEITAGVANFYARYTQAQYETYFASYLGGDDMWSRNASDGKTYEESIKKTLLDDLKNMALLEEHMKDYDVKLTKADKKAINDAAKEFDKANSQKKKDKVSGSKENVKRVMTLMAIEQKMRAAIVADANVKVTDEEATQKHMQYVEFDYSTTSDSSSSSDTTVSEAEKKKTKETAEAFAKGAKTAEDFAAYATEQGTEAKDATFDSDSVSPSKEVVKAADKLGEGETTDVIEGDTACYVAKVTSLNDKTATETKKQSMITDKQDKYYKKVLKKWKKEEKITVHKGSWNKISFTKLSVKAKDTSTTGTGSTSGNMSKIDEVRADMVKAMKAKDKDTKETLSMLLAALKNKAIDKREDLTPEEETQVILKEIKQTKETLDMTPADRTEIIEECNKRLAVLEQYAPKMMDEAEIKEVVASVLAEMGLDAPTAKDKGKIMKNLMPKVKGKADGKLVNEIVSTFMKMKATGIVRRIDDLGRVVVPKEIRRTLRIREGDPLEIFTDREGEIILKKYSPIGELSAFAKQYAESLSQVLECLVGICDMDQVVAAAGNGKKEIQDEDITGELGEFLKERKTRNAKAGEKRYVPIVSVSEPYKQEVISPILCAGDVIGAVFLLNQERTDRFKDTELCLAEYTAKVLGKQMEQMGKKGQNEVWIMWILKSLLAAYVVTGILLMILAMALYKFELTEEAVTAGITAVYLLSTFAGGLVAGKLAKIRRFFWGIVLGILYFAFLLLITWGIYRTFHGSGTEILMTFALCAGGGMAGGMISMKHVKSLNKPMNSNLKKSGCGECQTSCQSACKTSCTVGNQTCEQSKMIHQYRNNGYNIVMDVYSGSVHVVDDVCYDVIAEVNKSETEPTAESLKEADVKEKLLQTLGNKYETSDIEDALSDVIELTEGGQLFVKDTYECMIEEVKKRKTVVKALCLHIAHDCNLACKYCFAEEGEYHGRRALMSYEVGKKALDFLIKNSGNRRNLEVDFFGGEPLMNWQVVKDLVAYGREQEKIHNKHFRFTITTNGVLLNDEIQEFVNKEMDNVVLSLDGRKEINDQMRPFRNGKGSYDLIVPKFQKLAESRNQEKYYIRGTFTRNNLDFSNDIMHFADLGFKQMSIEPVVGDESDPYAIREEDLPKIREEYDKLAKMMIEREKEGKGFNFFHFMIDLNGGPCVAKRLSGCGSGTEYLAVTPWGDLYPCHQFVGQDDFLMGNVDDGIVKPEIADDFRSCNVYSKDKCRNCFAKFYCSGGCMANSYNFHGTIHDTYEIGCEMQRKRVECAIMMKAALADEEMKKSKSILSLLLAVILIVGLGFTVITGIGKSKSGAMKNIKLGLDLAGGVSITYQVKDKNPTKEEMSDTIYKLQKRVEQYSTEASVYQEGNDRINIEIPGVTDANKILDELGKPGSLSFQTADGETVLTGTDVKSASAKTGQDDMGNKEYSVELNLTKSGTSKFATATKENIGKQIAIIYDGETISSPVVRSEITGGQAYITGDFTYEEADNLASTIRIGGLKLQLEELRSNVVGAQLGEQALNTSLKAGIIGLILVFLFMIFVYRLPGLASSLALVIYTEIVLVILNAFDVTLTLPGIAGIILSIGMAVDANVIIFARVREEMARGRSVKVSLKSGFQKAMSAIVDGNVTTLIAAAVLWFKGSGTVKGFAQTLAIGIVVSMFTALVITRMIVFAFYGIGIRKESLYYHKMKERKPINFLGKKKVFFSISIAMILAGFVVMGVHSAQGNGALAYSLDFKGGTSMNVKFDKDYSIDEIDKEIVPVVEKVTGDHNIQTQKVSGTKQVVIKTVTLSLSEREKVNKALEDNFGVKESDITAENISSTISNEMRQDAVIAVIVATIFMLLYIWFRFKDVRFATSAVLALLHDVLVVLAFYAVSRISVGGTFIACMLTIVGYSINATIVIFDRIREELPLMKRNTDLSELVNKCITQTLTRSIYTSLTTFIMVAVLFIMGVSSIREFAAPLMVGIVCGGYSSVCVTGALWYVMKTKVGKKAQPKKKKKMERWVLLRKGADFEAIGKKYQISPRLACLIRNRDVIGEEAIERYLNGTISDLYDGMLMKDADKAIDILKEKIAEEKKIRVIGDYDIDGVNATYILLEGLERLGAYVDSDIPDRIGDGYGLNRHLIDRAYDAGIDTIITCDNGIAAANEIAYGKELGMTIIVTDHHEIPFDEIDGEKIYRLPPADAVIDPKQKDCVYPFKGLCGAAVAYKLMEALWESMGKDSTDLDDLIENVAIATVGDVMDLEDENRIFVKEGLQMLKRTKNPGLKALIECTGIDKESLNSYHIGFVLGPCINASGRLDTAKRALKLLRVRTQKEADILAGDLKALNDSRKDMTEEAVKLAKEQVETTDLSDDRVLVIYLPDCHESLAGIVAGRIRECYYKPVFVLTDAEDGAKGSGRSIDGYHMYEELNKCKDILTKFGGHRLAAGLSLEKENIAEFRRRLNENCTLTEEEMKEKVTIDMEMPFLCVTEELVKELELLEPFGKGNTKPIFAARGVTLLGARILGKNRNVLKIKAQDANGSVIEAMLFQNVEGFLKNMEETYGRMEVDALLQGRGGHIKIAVTYYPDINEYMGKRTPQIVITHYRMKPIEEYVRSIPDFPEPGIIFRDVTSILQDADGLHLAIDLIQEKLKDVDFDVVVGPESRGFIFGVPIAYNLHKPFIPIRKKGKLPCETVSVEYELEYGTATIEMHKDAIKPGQKVVIIDDLIATGGTNEAMVKMIESLGGEVVKAVFLMELAGLKGRERLEGYDVDAVITYPGKMSDKTTYESLDNRIAPEALTEDHTKGLAVVDGHAVKSQEDYEDPNRLYDMLIARIRKYHPSTDVSMIEKAYKLAVKAHGDQRRKSGEPYIIHPLWVAIILADLEMDKETIAAGMLHDVVEDTKFTEEDIRREFGDEVALLVDGVTKLGRLSYSSDKLEVQAENLRKMFLAMAKDIRVIIIKLADRLHNMRTLQFMTPAKQKEKAKETMDIYAPIAQRLGISKIKTELDDLALKYSQPEVFYDLVNQINARKTEREEFVEQIVEEVSTHMKNANIKAEVNGRVKHFFSIYKKMVNQDKTVDQIYDLFAVRIIVESVKDCYAALGVIHEMYTPIPGRFKDYIAMPKPNMYQSLHTTLMSSVGQPFEIQIRTEEMHKTAEYGIAAHWKYKESNDGKKSVEAQEEEKLSWLRQILEWQRDMSDNREFLNLIKGDLDLFAEDVYCFTPQGDVKNLPNGSTPIDFAYAIHSAVGNKMVGARVNGKLVNIDYKIQNGDRIEILTSQNSKGPSRDWLNIVKSTQAKNKINQWFKKEFKESNIIRGKDMIATYCRAKSINVANIIQPKYQEIVQKKYGFKDWDSVLAAIGHGGLKEGQVVNRLAEEYGKDHRQAITDEVVLERVAEAAKNKVHIAKSKSGIVVKGIDDMAVRFSRCCNPVPGDEIVGFVTRGRGLSIHRTDCINMIHLSESERARLIPAEWETEVTEKSGGQYLAEIKMYANDQQGLLMEISRIFTEGNVDVKSMNVRTSKKGTATIEMGFIVHGREELERIVKKLQQLSGIIDIERATGMKIEKYVVGMIGTNCYLVINEETKDTVMVDPGAYPAKLKNAVKEQGLKLKAVLLTHAHFDHIMGLSDVMEDIKVPVYVEEADLPMMMDGESNLSSGYMRGGYQFADAVPVRDGQQLQIAGFQFRVIHTPGHTPGGCCYYMEQEDVLFSGDTLFRTSVGRSDFPGGSASALVRSVKEKLLILPEETHVYPGHMEETTIGYEKRHNPFVMIQIICKSESYTYNAYHILKAFYPSQEVSCKTDEKASNYVMVHLPDDREISVGFENTVEITDTADRDESTGKIQEDSEKESQKKERKRQIDLSLYDQLERITGEPLAWGVLTGVRPTKLAMQKLEAGWKKEDYINWAWESARVRGEKAALAWEIAEREQKILKELDYENGYSLYVGIPFCPSVCSYCSFSSGPLDRWKEKVDAYVDALCKELEFIAERSKNKKLNTIYIGGGTPTTLTAEQLERLMSWIDEKFSREYLLEYTVEAGRPDSITEEKLKVIKNHDITRISINPQSMQQKTLDVIGRKHTVEEIKEAYALARKTGFDNINMDIIAGLPGEDISDMEDTLAQIAQMHPDSLTVHSLAIKRAARMEMEDLNRDAKETHEILSGMIERAAKAAKEMDLFPYYLYRQKNIAGNFENVGYAKVDKAGIYNILIMEEKQSIIAAGAGASTKIVLKDPIPMPGSKKKKMTRLIRQENVKAVDAYIDRIDEMIERKGEWLWHMALKKKPVTGMKDMLPREMEIRDYLIGLIKETYKTYGFCSIETPCVEHIENLCSKQGGDNEKLIFKILKRGEKLKIDTAKEENDLVDGGLRYDLTVPLARYYANHSNELPAPFKALQIGNVWRADRPQKGRFRQFMQCDIDILGEPGNLAEIELILATTAMLGKLSFQNFTVCINDRNILKAMAAYSGFREDDYDEVFIILDKMDKIGAEGVAKELEEMGYVKENVETYLQLFKDVAPDVTGIRFLKEKLGDCLSEETADSMEMIISSVETAKECEFNIKFDPTLVRGQSYYTGTIFEVTMDDFGGSVAGGGRYDKMIGKFTGQDTPACGFSIGFERIVMLLLENGYEVPTVKEKKAYLLEKKMTKEGLLKVMSLAKADRQAGKQVLIVNMKKNKKFQKEQLTEDGYTEIVDCYADSVENLMAESMKGLKRTHRCTELSAANVGEKVTIMGWVQKNRNKGGLVFVDVRDRSGIIQVVFEEGKCEAALIEKAAKLRAEYVVAIVGTVAKRSGAVNDHLATGEIEVIPEELRILSESETPPFHIEENSKTKEEVRLKYRYLDLRRPDLQRNLMMRSKVATLTRQFLAEEGFLEIETPVLIKSTPEGARDYLVPSRIQQGQFYALPQSPQLFKQLLMCSGYDRYFQIAKCFRDEDLRADRQPEFTQIDMELSFVDVDDVIEVNERLLAKLFKEVLGVEVSLPIQRMTWQEAMDRFGSDKPDIRFGMELTNVTDVVKDCEFVVFKNAIENGGTVRGINAKGQGGMARKKIDKLVDFAKDYGAKGLAYIAIHEDGTVKSSFAKFMTDDEMKALIEAMGGENGDLLLFAADKNKVVWDTLGALRLELARQMELLDKNEYKFLWVTEFPLLEWSEEQNRYTAMHHPFTMPMEEDLQYIDSDPGRVRAKAYDIVLNGNEIGGGSVRIFDQDIQSKMFEVLGFTEEQAQEQFGFLLTAFKYGVPPHAGLAYGLDRLVMLMAKQDSIRDVIAFPKVKDASDLMTEAPGHVDAKQLEELGIAVIAKEEKKAEDKEMPKHAGKVVGVFKLKEKFKKLKKAVDNTIYIRYTEYRSDEHKIIKHTMNQERVVKAGLLGLGTVGSGVYKLVERQKNEMALKAGAGLEIQKILVHNMNKKREGVDQSLLTDKWEDIMNDDEIEIVIEVMGSIEPARTMILEALHAGKNVVTANKDLVATHGHELLEAAEESGVDFLFEAAVAGAIPIIRPLKQCLAANEIQEVIGIVNGTTNFILTKMIEEGMDFDEALALATELGYAEADPTADIEGLDAGRKVAIMASIAFHSRVTFDDVYTEGITKITAKDVEYAEEFGDVIKLLGVAHNTEEGIEVAVHPMMIPKEHPLASVRDSFNAVFVRSDAAGDTMFYGRGAGELPTASAIMGDVIDVIRDIQYHCTGRISCTCYRETPVKNFKEVKNKFYIRMLVDNKPGVLAAIASVFGVHKVSIARVIQNTKEDDAAELVIVTEAVKEKHLEDALAHLVDMDTTREIGTVIREYMKEQKKVNPLATESEGKLIAKFAIPAIISMLVSSLYNIVDQIFIGQGVGLLGNAATNIAFPVSIICTATALLLGIGSASNFNLCSGAGDHEKASRIAGTGLSMLVICGVIIAAVVLVFLDPLLHLFGVTTKILPYAQDYTGITAFGIPFLILTTGGNHLIRADRSPTYSMTCMLTGAIINTVLDPLFIFGFHWGIKGAAWATVIGQIVSGIMVIVYFGRFRKMELKKEMFRPRGHLLKMILSLGMASCINQIAMAVVQITMNNTLRYYGAASVYGTDIPLACVGVISKVNMVFMAIAIGISQGCQPIWGYNYGAGSYDRVKRTYWKAFRVAMTVGIVFFLCFQFFPTQLVSIFGTGSKEYYEFAARYFRIFMFMTFVNGIQPMSSGFFTSIGKAKLGIVVSLTRQVIFLLPLILIFPIFMGIDGVMYAGPIADAAAGIVAIGFAVKEIRAMDKIAMKERLPVGFMFKQINNIYEKEFNNLLRGIGITSSQCAVLDYLLGSSKEFVNQKDIEKALSLKNPTVTGILKRLDEKGFILAVPSNQDKRCKNIYPTEKAYDIQKKMDNYRKKIDRRLTIGMSKKEIAALEKMLDRILYNISDPMSYADKVFINMCRDIIDNGTDTRGEKVRPVWEDGTPAYTIKKFGVVNRYDLSKEFPALTLRRTAIKSCTDELLWIWQQKSNNINDLHSHIWDSWADENGSIGKAYGYQMGVKHQYKEGMFDQVDRVIYDLKNNPYSRRIMTNIYVHEDLHEMNLYPCAYSMTFNVTKKPGHDKLTLNAILNQRSNDVLAANNWNVCQYAVLIHMLAQVCDMEVGEFVHVIADAHIYDRHVPMIEELISRKPLPAPKFWLNPEVKDFYQFTRDDVKLIDYQTHDQIKNIPVAVMNLIVAVDSNWAIGKENKLLVSIPQDMKFFRETTKGKVVAMGRKTLESFPGGQPLKNRVNVVLTTDKNYKVKDTVIVHTIEEMVDELKKYDSEDIFVIGGESIYRQLLPYCTKAYITKIDHAYDADTYFPNLDEDPEWEMTKISDEQTYFDLEYVFTIYERRMRVLSVTAQKPCSTGSGVYLTEVVRSLAKMGVSQAVVAGVTREDRVDMPEGVTVYPVYFSSEKLPYPVVGMSDEMPYTSTRYRDMTEEMAGQFKAAFLEVLDEAIEKENPDIILCHHLYYLTALIRAHYSAKKVYGFCHNTDLRQMESILFERNFIRQEIPKLDRIFALQEAQKEKIKKIYPVSEKQMTVIGTGYNSEVFKKTGIKLSRKDGKIRMIFAGKITQKKGVKSLLRALNLLDYEKEKIQLILAGGAGNLVEYEEIKELADGCRYPVVFAGCVTQSRLAELYNDCDIFVLPSMYEGLPLTVIESLACGDRVVMTKLEGIAEWLADMVPDADIRYVLPPEMKGTDEPLEEELPAFESRLTEALREAIEEKDTKECDVSRISWQKIAREVIRMAKAFGIVNFAGNHIRVEGMQEYRPVGAFSFLGRYRVIDFPISNMSNSGIDHIQVYIRRNPQSLTAHLGTGRHYNINSKSGNLQILYSGLGMNMSLYNNDIASYIENLEYIEQELAEYVVIAPSYMVYTQDYKKLLNDHIESGADITLLYHSVDTAKEYFLNCYALNLNKQKGVLSLEQNHGNAKNKNIFMDTYVMKKDLFIELIHKAKKTSSVYTLLDIVNASCDELDIRGVSHKGYFAAISDFKSYYDSNLSLTDIKTAQNLFDPNWPIYTRTNDSCPTQYFETGNAKNSVVSNGCLIEGSLEHSVVGRGCIIKKGAVIKNCVVLSGAYIGENVHIENQVVDKHAKITHVKELTSSEDRPGYVRRNDTLMKQNNMLAMILAGGRGSRLHELTNKVAKPAVSYGGKYRIIDFPLSNCANSGINVVGVLTQYESILLNSYVAAGRRWGLDAKESGVFVLPPREKADANLDVYRGTADAISQNIDFIDTYSPEYLLVLSGDHIYKMNYDKMLQEHKDNGADATIAVIEVPMKEASRFGIMNTDDENRIIEFEEKPEHPKSNLASMGIYIFNWKLLRKKLIADMKDPDSNHDFGKDIIPTLLNDGKKLYAYKFKGYWKDVGTIDSLWEANMDLLSKNNELDLNDPTWKIYTEDATALPQYIGPDAEINHAFVNQGCVIEGEITNSVLFTGAKVGKGAKIIDSVLMPGVVVDENAVVTRALVADNVKIGAGAVVGDAKSEHIELISKRVKGVEMKKISGNKLLVKALSEEQVDTIFGYPGACTIDISDELYKQDYTKVILPRQEVALVHEADAYARSTGKVGVCLVTSGPGATNLVTGLATAYYDSVPLVCFTGQVSRHLIGNDAFQEVDIVGITRSITKYGVTVRNREDLGRIIKEAFYIARTGRPGPVLIDLPKDVMGELGNAEYPKEVNIRGYKPNTHVHVGQLKRAIKMLSKAKKPLFLAGGGVNIAHANEEFTKLVDMTNVPVVTTVMGRGAISTTHPLYIGNLGMHGAYACNMAVNECDLLFSIGTRFNDRITGKLHSFAPNAQIVHIDIDTAAISKNVQVDVPIVADAKEAVSKMLEYVSECETKKWLATIEEWKEEHPLMMKKKPIMTPQDVIETINRIFDEAIIVTDVGQHQMFTAQFIEITEKKKLLMSGGLGTMGYGMPGAIGAKIGNPDVPVISISGDGGFQMNSQELATAVLEELPIISCIFNNNNLGMVRQWQKLFYGKRYSMTCLRSGAACRGKCGEVECPTYTPDFMKLADSYGAKGIHITKKEDIEPAFREAMKSTKTPYILEFDIDPEDLVYPMVKPGGTLEDLIMDCMNNNGMKKRWISLYVENQVGVLSKISGLFSGKSYNLDSLTVGTTEDPTVSRMTIATVSDDETFEQIXXXXXXXXXXXXXXXXXXXXXXXXXXXXXXXXXXXXXXXXXXXXXXXXXTYERNLICKSTMKEILYVKVRKCTKDDKVECFQIAETFKAKVIDYGKDSVLMEFVQTGTKNDAVIKLMKEEFESIEVVRGGSVGIESISMMERMEKKNIDWSNIGFGYMRTDKRYVSNFKNGAWDEGTLTSDDQITISECAGVLQYAQTCFEGMKAYTTEDGHIVTFRPDLNAARMANSAARLEMPVFPEDRFVDAIKQVVKANAAYVPPYGSGATLYVRPYMFGSSAVIGVKPAEEYQFRVFATPVGPYFKGGAKPITIKVSDFDRAAPHGTGHVKAGLNYAMSLHAIVTAHEEGYDENMYLDAATRTKVEETGGANFIFVTKDNKVVTPKSSTILPSITRRSLMYVAEHYLGLEVEEREVYLDELGDFAECGLCGTAAVISPVGKIVDHGKEICFPSGMEEMGPVTKKLYETLTGIQMGHIEAPEGWICKICMKDLLFSTLKGYKKEYLPKDIFSGIIMAAVSIPISMGYAQIAGLPAVYGLYGSVFPILFFALFSTSRQFIFGVDAAPAAIVGAALVSLGIENGSKEAIQYVPVIALLTGIWLLLFYFLKAGRIVDFISTPVMGGFISGIALTIILMQIPKILGGKAGSGELPELIRHIVQTGKEINWLSVILGAGALILLRVAGKMIPKFPMAIVIMAAGVAATRIFHVDEYGVVLLDAVGKGLPKLVHFRFVGIDLRQALGRSLMIAAVVMAETLLSENNFAMKNGYKIDENQEILACAMGNIAAACVGCCPVNGSISRTSMNEQYEGKTQAVSVVAAITMALVLLGATGFIGYLPVPVLTAIVISALMNVVELHLAVRLFRVSRNEFYIFVAACVSVLVFGTIYGVVIGLLLSFVAVVLRATNPPRSFRGMIPGKEAYYDLKRNRNAYPIRHTVIYRFSENLFFANIKVFQTDIENSIKEDTKVVIVDAAAINSIDITAADRLEMMAENFERKGIKFYITEHSENVNEQMRKLGIGHLIEEGKVRRTILAALQDAGIPSMGTTAGADKARNSLVWMPWQLEIPAAVHAVHEAMVPAEEENTLEEFAWAFGDDAVEEMEKKVHQVMEQIHKLPDLERLADVGFEEKLKNWHALGVLDEDEILRRMEMHLDELPENLRGDRKVILQLIEKRRRKIEQQLLLHHPEIVEYLKKSRERLEKRLEKQNPEAARKLHEWEVQIREKEEEMSHLVITIGCEYGAKGNQIGRKIAEDLGFQFYDRNIVDAIIHEVGIPGEIMEKVEEGVTIVGKGAEGEERGEFSQYADLTKRAIHVQKTIIRKLSDRESCVIIGRSADYILKEHKPILRVFIYSPDEVRIKNVMESHKVSEKEAKQIILETDKRYHKRHMALTGSNRGDRHNRDILIDSSLLGVDGTARLIETLAKQVEKQMNKKKSDFDKVFSAWDILVIAFGAMIGWGWVVSTGGWIEKGGVVGAALGFAIGGVMIFFVGLTYAELTAAMPQCGGEHVFSHRAMGPVGSFVCTWAIILGYVGVTCFEACAFPTIITYLCPGFLKGYLYTVAGFDIYASWLIVAIVVAFLIMVINIMGAKTAAILQTILTVIIGGAGILLIIASVLNGTVDNLDGQIFAGTTGVSNVKAVLGVAVLSPFYFIGFDVIPQASEEINVPPKKIGKMLILSVILAVIFYSFVILAVGMVLDSGAIAASQKGTGLVTADAMAVAFRTSVMAKVIIVGGMCGIITSWNSFMIGGSRAMYSMAESYMIPKMFSKLHPKHKTPINALILIGVLTMLAPFAGRVMMVWICDAGNFGCCMAYCMVSLSFLILRKKEPDMPRPYKVKHYKFVGTMAVLMSGFMVCMYCIPGSGGNLILPEWGMVVAWSLLGVVFYAICKSKYKEDFGSLVELISDEDSATLMPEADEEKLDEVIDHAIDVVLGVMNIIINHSSMQPIYEQIMGQIKERIMHGELKEDTALPSVRTFAKELKVSALTVKKAYDGLEEEGFIVTVHGKGSFVACANQETMLEEKKREVEADLEMAIRKGRSCGMSDQEIRELFQIVLEDMVKLEKVKKQYKDFELDCSMEIKEGWITGLVGQNGAGKSTAFKAMLGLIRSDSGKIEILGKTPELLGKEEREQIGVVMAGSGFNGYLSINDLIPIFDAMYQKFDKAWFLKECEKFKLPLKKKIKEFSTGMNRKLQILAALSHDAKLLILDEPTAGLDVVAREQILNMLREYMEMPGRSILISSHISSDLEGFCDDLYMIDNGKIVLHEETDRLLEEYGVLKVSKEQYQELDHTYILKKHKDTFGYRCLTDQKQFYQENYPGIVIEKGNIDELITIMIQGEKIMKGLLIKDFRLLKGQVHFLLIVTVCVIVFMINGNEAFGVAYVCSMVALLSLTTVSYDEYENGSAFLFTLPITKKDYVKEKYLFAGILLLIGLIVSMIMWYITAVIKTGNIAWDDWMSCCIGGVTAGLMMVAVALPAQLKFGPERGRIALVTIVLLAVALGILMQEFTKGTKFAQSAKRILNQMDKLGTKGILGVIVIIWVIVGVISMIISMRVMEKREFMKNNFPHVFSPLTVRGMTLKNRVVMMPMGSDFAGHDGELSDEHIKYYELRARGGTGLIMVENVCVKYPEGSNGTTQLRLDKDCYIPRLFTLTEACHRQGALMGIQINHAGASAMSSRIGMQPVSASRFPSKAGGEIPRGLSKEEIESIAKDYGTAAKRAVNAGFDVVEIHAGHSYLISQFLSPTTNDRTDEFGGSAKNRARFCRMVIDEVRKAVGPRVPISLRLSVDELVEGGNTVEDCLEYLEYLNDEVDIYDTSAGLNASIQYQIDANYLEDGWRSYMAKAVRDKFGKPTIAIGNIRDPKIADDILARGDADLIGMGRGLIADPDWCNKAQYGDVCDIRKCISCNVGCVGNRIGGNKPLRCTINPDLINGEAYKKQKVNKPCNVVVVGAGTAGLEAACTAAEVGCNVTLLEKEKEVGGLSVEISKIPAKKRLADFPAYLKHRASKLSNLTIKTGVDATVAEIKKHKPDLVVNSTGSVPLLPPIEGLHDNLGKKDASVYSIKDMIANLKNYPEDMTGKKVVVVGGGAVGLDVVEFFAPRGAETTIIEMMPIIGNGLDASSTSSMKECMEKHHVRQMTNTALQKVNAHSFLVKYDGKEEELPFDYGFVCLGMRANAPIWNDIQEAFVGEDVEVLNIGDSVRARRIIDGTDAGRHMVLNTLERLNYLPMLDFFCNGCQRQQIIIIIGRFIFYQRLSSRTADIILSLILQNILHGIRLVIIPNNSTWERHLSCFNGIIAMINSYDYRNHILSFFLFNVRSKMLSLLQRIVAKVPFVNTFLCSSVPKPAENLVFLYHYRQRNTTVPSQPVIKDPSPGGGPACPGEGYIASFLFEQLPVFLFLKSDYIKGDSILCEKRFHPDTHYMVEIEMLKTDNTLGKKGAYIRKFLTEDEYSSMLQKQEKHLIKIKRQAIVQKGNLRYIPPPDRLDRRRERDILMIIIGIDHGYYAIKTRQVSFPSGIIRYDYEPYTMQNVLQYQGKYYVCGTGRQTLVKNKTSNDNYYLLTLAAIAEEIKHRGSYASGSLYGSVGKTWRTLVLTTGDSKQDIGVFESETAAPVSFSVQWLNMTRIELTKKDINTQNPLSGAVYGIYTDKKCENLLMTMTATGTDGKAVSDYFDSALKTVYVKEVTAPTGYGKAVSDYFDSALKTVYVKEVTAPTGYKLNTEVYKVDVAAGKTLSVTATDERVTGKVKIAKIDKETLAFKAQGDSTLRGAVYGLYAKEDIVHPDGYIGWALQRGGYTEANALQFSQEQAASHGWSSYGDPEYVPHVMRYYSGGSLFSNFMVRKPAIHGHYKAEEEKAWYNNYKDFMMNGWTKKRKVDTFMGILLQVYCFFPWMHINRKWNTIHMYVIKTFQENDYIKMYNHTFLKQHMWKWKHSQVVAFIFLLMLIFLILLQSIELYELYQCIKNGNQSTNYHVFVWITYLAAFYIFMAIASTGFVEFYSMPMFCYMMLFLAVIGIWIFLDIQAEAWDVETEQHRAELEEQDKKMLQMKVKAMEEQYREMLKSRKIVHDMKNHLLALKKYTQEQDWKGLEEYLNELSRDMLDYNYQIWTGNHMLDMILNQKEKEAEKQKTQMQISTEVFTTLPFSDREIISLFGNLLDNALEACEQIKEGERWIHIKMKKKNQLLYIEIVNAAKNTGIQTDENFVSKKKDGVLHGYGMKNIRDIVEQYNGMFQCKSQEDRFEVVITIYGMKETKKRRYIVSTIMYGMILIFIQLPWVVLKGKNYSIYAAYFRIKAKGIKALSEMAASVWDGNLTIIRIQLILFIVFQIVIVLHIVTQWLHKEYYLNIAALVVLGVYIVVNESGFGMLADNSTKTILIPAIIMIFVMAEVLIRKMLDVWKDAKESAEIFAEKEREEKEEERRRLYFPGNYTKLFYQMVWHNFKYDWKDYGLLLFCGVIVSAFSFAGLGIYQMMAKAHRAENFLLGEGLGRILLNAMLPMAVCAIFLMVFVLVFYMKKWTQNYSVFVTLGIRKKALYTIIGIEIAVAFLCSLIAGGLLGNMIMFLFRKVIFSMLAKGIVLSKVTWLTYVKGTLVVLAVYIIALMATRDIVSDFNLVRASIRNIAKEPMPQRRTKLFITAGIIICMIAIFEYRQLRNHESMYLLFAFFAGIFLLIRFVGAGYLRRAKKTPAYLPQMLNRNHLYYKSKTTARYVLALTILNVCAVFYFLFQVVSVTIAEKPESLYPYDFVCIADDGDDAIFDRIKNGYQAKIIEYPMVRVANADKTEQNEGVQQGKRPQGQQIGISESTYKQLKKYVDPSYKEEAMHLDRNGKKVYLVHQQDRSVKAQPVDWTFGKKKPFLHIGLPCEYYTLYSPSKAYPKRTIEGEEIGSLIGCFRQGKLENIVVFSDAYFKKAQGMWKYTNILTGDKIEEKALRIDGVTIKQGPTKLVLIQADPKYQKAIEKKMKKLEKNHTYEAQYDFEVHCWYSKKTAVNDLKTEYTMKLIINTFVLLTMTISGLFLMYIKSLSEMSDKKARADFLKCMGMRKKERVSLLKRELYYFYWLPELITIVVTSIFTAATFHARMYTHAVRIAWLKHAVWIWLMYLAVQWGFAWILGRFIIRKVEGKDEMNKREVMKVENLVRNYKMVYSDRQGEEEIKVLKGLDFTIEEQEFVGIMGKSGCGKTTLLKVLGLIDKPTSGKIFFTGKDASELWSDELADIRRREIGFVFQDFYLLNSLSVKENIMLPMVLDKAPVDKCYKNVEAYAENFGLSHLLEKQPYEVSGGEKQRVAICRALINNPDLILADEPTGNLDSKSGKIVIDALKDINEHMGKTIIMVTHDPQMASYCSRLILLKDGVILEDLKNSGDQEAFYQEILEKMKELMKGRDEFLGIQDTLKALADPIRREILNLLKKGRLSAGEICEHFSVTGASISRHLAILREADLIRNQREGKFIYYELNTSVLEDVMLWITDLKGAADDEGNDKKIMKEMIRKYRGTLISSALVILAGVLVGFTSIQGKWINLFFVVMQCVFVAIIFYDNRNRQQNRKVIGMTIWIIPVITLLYNGIVRLVDMGADIENLFMAFIYYGTGLMFMVIGNYLPKVKQNNTIGIRVVWTLQDEENWSATHRFSGKIWVASGILCMLCGLFAESIAALVLYVVSIMAAVIISVLYSYFFYKKKIETGEKLKIQYKKKAIVRYGIVTILTIIFIIGSLFWGSIDIQFQDNSFTIKAQGWSDYTVDYTKIDSISYEENLFQNSNDYRTNGLGNFKYAMGNFRNDVYGNYIRYTHSSCHSYVVMSIGGKILVVNGENDQETKEIYHNISEKKMRRLALTDDILMKIEKPARYIGNEVNSVMKDLKNEPSVLLVDIGGWTVDLMRLDNAVPNAATCRSLELGVIRCIDETAEQVRRNTGLSVTETQIERVLRGESCSMAEEARRIIQENGRKYIERILSAVTESGFDLRAVPTVFMGGGSAILKRHVTAQDMGLFEEMYHVYAEKKNGYEYKVQSLYYRLLYLLVSKYRKTDLDAEKICANKKLNKLSTITDYMKQNYSKELSLESLARTFNYSPTYLSRMFRKYAQMSYKTYLDDLRLRHAYNDLVNTDLSIGMIAEKNGFAGSKAFARVFKEQYGELPSEYRKKQMEYSHEIIVPNDDLPFKMFIFEGSRGGYIRQKHWHRSMEIFAVFDGEMEFYLNDKRYPLHPGEFMLVNSNELHSIYAPKKNKTLVIQIPVATFERYYTDDGFIYFSHSSRIQRMQNPEIVIIGAAIIDVLAYPVNVKVFETGSYSTEDIHMTTGADALNEATILAKKGRRVQLETVIGQDDAGKFIQAHCNDAGIMVRDACIKKDEKTGMNIVLVEQDGTRSFLTNPHGTLRSLKVEHIQMPFPESAKIVCFASIFVFPKIGPDKLVQIFSQAKMQGKIVCADMTKRKKGETLEDMAEAFSYIDYLFPNDEEAMLLTETESVEEAAECIKSTGVGNVIIKCGKRGCYIRTDVEKCWIAAEENVNCIDTTGAGDSFAAGFLNALLDGNGVKRCAKEGNRYGAEAVQHIGATAWLNDGLMAKAKFERTKPHCNIGTIGHVDHGKTTLTAAITKTLAARVPGNTAENFEDIDKAPEERERGITISTAHVEYQTEKRHYAHVDCPGHADYVKNMITGAAQMDGAILVVAATDGVMAQTREHILLSRQVGVPYIVVFMNKCDMVDDDELLELVEMEIRELLDEYEFPGDDTPIIQGSALKALEDPNSEWGDKIMELMDAVDSYIPDPERDTDKPFLMPVEDVFSITGRGTVATGRVERGVLHVSDEVEIVGIHEETKKTVVTGVEMFRKLLDEAQAGDNIGALLRGIQRTEIERGQVLCKPGSVTCHHKFTAQVYVLTKDEGGRHTPFFNNYRPQFYFRTTDVTGVCELPEGVEMCMPGDNVEMTIELIHPVAMEQGLRFAIREGGRTVGSGRVATIIEMAGREYPLERTRNIGIMAHIDAGKTTLTERILYYTGVNYKIGDTHEGTATMDWMEQEQERGITITSAATTCHWTLEEFTKPKKGALEHRINIIDTPGHVDFTVEVERSLRVLDGAVGVFCAKGGVEPQSENVWRQADTYNVPRMAFINKMDILGADFYNAVDQIKTRLGKNAICLQLPIGKEDDFKGIIDLMEMKAYIYNDDKGDDITVTDIPEDMADDAELYHTEMVEKICDLDDDLMMQYLEGEEPSIDDMKKALRKATCECTAVPVCCGSAYRNKGVQKLLDAIVEYMPAPTDIPPIEGVDEDGNDVVRHSSDEEPFSALAFKIMTDPFVGKLAYFRVYSGTMNSGSYVLNATKNKKERVGRILQMHANKREELDKVYSGDIAAAIGFKFTSTGDTICDEQHPVILESMEFPEPVIELAIEPKTKASQGKLGESLAKLAEEDPTFRAHTDQETGQTIIAGMGELHLEIIVDRLLREFKVEANVGAPQVAYKEAFTKPVDIDSKYAKQSGGRGQYGHCKVKFEPMDVNGEETFKFESTVVGGAIPKEYIPAVGEGIEEAMQSGILGGFPVVGLKANVYDGSYHEVDSSEMAFHIAGSLAFKDAMKKASPVLLEPIMRVEVTMPEEYMGDVIGDINSRRGRIEGMDDLGGGKIVRGFVPLSEMFGYSTDLRSRTQGRGNYSMFFEKYEPVPKSVQEKILSSKNDMPRKGHTQKRDVLADPVYNNKVVTKLVNNIMLDGKKGVAQKIVYGAFERVEAKAEKPAIEVFEEAMNNIMPVLEVKARRIGGANYQVPIEVRPERRQTLALRWLTVYSRARGEKTMEERLANEILDAANNTGASVKKKEDMHKMAEANKAFAHYRFMPTFNQLVKKGRQTSVKKSTAPALQKGYNSLKKRSTDTSAPQKRGVCTAVKTATPKKPNSALRKIARVRLSNGIEVTSYIPGEGHNLQEHSVVLIRGGRVKDLPGTRYHIVRGTLDTAGVAKRRQARSKYGAKRPKDKKMTENRMKRKKTGIIWLIFMIIWMSVIFSFSAKKAVESEGMSHSVGKEIGRLIVPQFTSWSEERQEQFAKMIDFPVRKCAHATEYAVLGVLILGTAYSFSEDSGKRSMLICWCAGTAYAASDELHQLFVPGRSCQFRDVCIDSAGVLAGVLVFSLIKHEIVKYKEKKKSCKNMKTALVIMAAGMGSRFGGGIKQLEPVGPNGEIIMDYSIHDAIETGFNKVVFIIRKDIKEAFHDAIGKRIEGICNRLNVEFAYAYQELDDLPEGIKKPVDRSKPWGTGQAVLVCKDIIKEPFVVINADDYYGKEAFVKIHEFLINNYTPERSKELCMAGFILGNTLSDNGTVTRGICAVDENDYLTDVMETYEIKKTEDGAESQGNKINVNSHVSMNMWGLTPEFVGLLEEGFVEFFENIKGDEAKKLKGEYLLPIYIDELLKKGKVSVKLLETQDKWFGVTYKEDKPVVVESFAKLIADGVYRKDLFSDLQAMCGIVGFTGEHQAAPILLDGLAKLEYRGYDSAGIAVRDGDADVEVIKAKGRLKVLAEKTNDGETVKGTCGIGHTRWATHGEPSENNAHPHKSDDGNVVAVHNGIIENYQELKDKLVRKGYTFYSETDTEVAVKLVDYYYKKYEGTPVDAINHALVRIRGSYALAMMFQDYPEEIYVARKDSPMILGVANGESYIGSDVPAILKYTRDVYYIGNQEMARVRKGEITFYNLDGDEIEKELKTVEWDAEAAEKAGYEHFMIKEIHEQPKAVSDTLKSVVKDGAIDLSEVGLSEEEIKEISQIYIVACGSAYHVGVAAQYVMEDLARIPVRVELASEFRYRNPILDPKGLVIIISQSGETADSLAALRESKKQGVKTLGIVNVIGSSIAREADNVFYTLAGPEIAVATTKAYSTQLIATYTLAIQFAKIRGQITEEQYTGYIEELKTIPDKISRIIEDKERLQWFASKQVNAKDIFFIGRGIDYAISLEGSLKMKEISYIHSEAYAAGELKHGTISLIEDGTLVIGVLTQPALYEKTLSNMVECKSRGAYLMGLTTFGHYNIEENADFSVYIPKTDPHFATSLAVIPLQLLGYYVSVAKGLDVDKPRNLAKSVTVEMGRYFGTDGFRGEANNNLTADHAYKIGRFLGWYYGEVKRRNGDDTPARIVIGKDTRRSSYMFEYTLVGGLVASGADAYLLHVTTTPSVAYVARTDGFDCGIMISASHNPYYDNGIKLINGNGEKMDEGTIALVEDYLDGKLEVFGENYEEIPFAHTSKIGRTVDYVSGRNRYIGYLISLGLYSFKGVKVGLDCANGSSWNLAKSVFDALGAKTYVINAEPDGTNINNNAGSTHIGGLQKFVVENGLDVGFAYDGDADRCLCVDEKGNLVDGDAILYIYGKYMKERGKLENNTVVTTVMSNFGLYKAFDEAGIGYAKTAVGDKYVYEYMTKNGCILGGEQSGHIIFSKYASTGDGILTSLKMMEVMMARKKKMSELLDGLTIYPQVLENVRVTDKKAAQDDADVQAAVKAVTEALGDTGRILVRESGTEPLLRVMVEAETEEVCRKYVDQVVDVVKAKGHIASMKKYDYLVVGSGLYGAVFAHEARKAGKSVLVIDKRPNIAGNVYTEEIEKIHVHKYGAHIFHTNNKKVWNYITQFAEFNRFTNSPVANYKGELYSLPFNMYTFNKMWGVVTPEEAKAKIEEQRKEITKEPENLEEQAISLVGRDIYEKLIKGYTEKQWGRDCRELPAFIIKRLPVRLTFDNNYFNALYQGIPVGGYTKMVENLLDGIEVRLNTEYLENKEALDALAEKVIYTGPIDAYFGYELGTLEYRSVRFETELLDQENYQGNAAVNYTDRQTPWTRIIEHKWFEFGKDSEGNDIPKTVISREYSSEWKLGDEPYYPVNDEKNGALYARYKKMAEKEEKVIFGGRLGEYKYYDMDAVIASSLELCEKELGMKAEMHKEFLMGNAAIALGAVAAGVNVVAGYPGTPSTEVLETVAKNRPDDVYVEWSVNEKAAMELAAGAAYAGARSMVTMKQVGLNVASDPLMSLEYVGIKGGMVILVADDPGPISSQTEQDTRHFSRFSKLPCFDPSSAQEAYEMIQEAFEYSEEYGTPVFLRPTTRVCHGYASVTVKDEKEFTQHKPEGFIKDSKRWVIFPRLSFMNHQKIEARNRELSDVFSSYDKNKIHPSCEAFKDSKKGIATGGISYTYAMETLKNTGMVKNLKVATPHPFPEKLAVEFLTGLDEVLCLEELDPVIERELTYICGKYHLPVKIRGKLSGDTACAGENTRDSVTSYINTFLGLSDRKDAGLPVAPELPVRPPVLCAGCPHRASFYAVKKAMKGKKTIFCGDIGCYTLGNAMPLDMVDTCLCMGAGLNIAQGVEKVEPDTTCFAFVGDSTFFASAITGVVNAVYNQANMVLIVLDNSTTAMTGHQPHPGTGHTVMGEIVQKINIEQVLHGIGVTDVETVNPLDLHTSVECVQKMAERSGVKAIIFKSPCIAVTKPAAPLHVSSDKCIGCKKCIKELGCPAIVLNNGNVCIDSSMCTGCGLCSQVCPVTAITGGEDHEMNNQKNIVLCGVGGQGTVLASKLLAAAAMSKDIPVMSAETIGMAQRGGSVFSHLRMGNNLYSPMIETGTADLIIGFEPGETVRMLPYLKTGGHVVVSTRAVKPVTATLSGFDYDAPQMLDYLKANVPNLTFVNADQACSDIGSSKVLNMVLLGAAIRTGVLDFTISEIESIMKQTLPEKFHEMNLRALNYNIMQITETQIAQVNKQIKALLSAESFYGKKLEEAGVTSIQSAEDFQKLPFSEKNDLRNAYPLGLMTAPEEKIVRIHSSSGTTGLPVIIPYTQKDVDDWAVMFKRCYEMAGMTNMDRIQITPGYGLWTAGIGFQAGAERLGSMVIPMGPGNTDKQLQMMMDMKTTVLGSTSSYALLLAEEIQKRGIKDKIHLKKGIIGSERWGEKMRKRITEELGIEIYDIYGLTEIYGPGIGISCSHDCGMHYWDDYIYIEIIDPVTGEVLPDGELGEIVITTLVKEGAPLIRYRTHDLSRIIPGDCPCGSKFPRLDTIMGRTDDMMKIKGVNVFPAQIEEILKEFPEVSSEYQIRISHLEGKDTMRIYVETNGTVDFLDLAKRIASKVKSRIGFTPLVKVVEIGLLPRSEKKTKRVIDERYEMTRDQAYEILTKYMKGEHYITHSLAVEAIMRGLAKRLAPDDVEYWGIAGLLHDLDEEQCDWQHDLSVHGPTSVEILKKEGIDDPILFGAICAHNPKSGVKAKTKIQYALLAADPMSGFLKAVAQIYPDKKIASVKRKSVLKRFNEARFAKGANRDYMESIEFTGLMLEDLIDIGLEEMCAISDELGLMDQGKLTRVLKSMEEHEIPQMIISDPVAIFYLTGKWIFPGERLLALYLNVNGNHKMMINKLFPQESDLGVDIIYYDDIEDGVEILSKYVEKDKTMGIDKTWPSKFLIRLQELGGGSKFVNGSPIIDYIRMVKDEKEQDLMRKSSKINDIAMDKIIPWVAKGLTEKELNAKMREIYKELGCEDVSFDPITAYGHGAADPHHVTDDSKGKRGDCVILDIGGFKDNYASDMTRTVFIGEVSDRAREVYNVVLEANLRGIAAAKPGNRMCDVDLAARNYIEEKGFGEYFTHRTGHSIGLEDHEFGDVSSVNTDIIKVGQCFSVEPGIYLPDENIGVRIEDLVLITEDGCEVLNDYTKELIVVPEEMPENNKEQTYQPMTFDAIKIGLASPEKILEWSKGEVTKPETINYRTLKPEKDGLFCEKIFGPSKDWECHCGKYKKIRYKGVVCDRCGVEVTKASVRRERMGHIALAAPVSHIWYFKGIPSRMGLILDLSPRTLEKVLYFASYIVLDKGESDLMYKQVLSEAEYQEAREKWGSAFRVGMGAESIKELLENIDLEKEYAELTEGLKGATGQKRARIVKRLEVVEAFRESGNKPEWMIMTNIPVIPPDLRPMVQLDGGRFATSDLNDLYRRIINRNNRLRRLLELGAPDIIVRNEKRMLQEAVDALIDNGRRGRPVTGPGNRALKSLSDMLKGKSGRFRQNLLGKRVDYSGRSVIVVGPELKIYQCGLPKEMAIELFKPFVMKELVQNGTAHNIKNAKKMVERLQPEVWDVLEEVIKEHPVMLNRAPTLHRLGIQAFEPILVEGKAIKLHPLVCTAFNADFDGDQMAVHLPLSVEAQAECRFLLLSPNNLLKPSDGGPVAVPSQDMVLGIYYLTQERPGAKGEGMIFKSFNEALLAYENAAVTLHSRVKVRVSKKMPDGTVKTGTVESTVGRFMFNEIIPQDLGFVDREVEGNELLLEVDFHVGKKQLKQILEKVINTHGATATAEVLDHVKAMGYKLSTRAAMTVSISDMTVPPQKPEMIKNAQDTVDKITKNFKRGLITEEERYKEVVETWKATDDALTKALLDGLDKYNNIFMMADSGARGSDKQIKQLAGMRGLMADTTGHTIELPIKSNFREGLDVLEYFMSAHGARKGMSDTALRTADSGYLTRRLVDVSQELIIHEVDCAKPGMPIPGMYVKAFMDGNEVIESLQERITGRYICENIVDKDGNILVKANHMVTPKRAELICKKGVDEKGEPLTQIKIRTILTCRSHSGVCAKCYGANMATGEPVQVGEAVGIIAAQSIGEPGTQLTMRTFHSGGVAGGDITQGLPRVEELFEARKPKGLAIITEIAGTANLNDTKKKREIIVTNRETGESKAYLIPYGSRIKVADGAELEAGDELTEGSVNPHDILRIKGLRAVQDYMIQEVQRVYRLQGVEINDKHIEVIVRQMLKKIRIEESGDTEFLPGTNVDRLEFEDVNEALEAEGKEPATGEQIIMGITKASLATNSFLSAASFQETTKVLTEAAIKGKVDPLVGLKENVIIGKHIPAGTGMRKYRDIKLNTEMEMEDELDFEDDFDFEFGDAEEVKQEGASDEEAVTATSEDEEMEKNRIRPIKSGKSSRMSYARQKEVVQMPNLIEVQTDSYKWFLEEGLNEVFDDISPITDYSGKLSLDFVDFTLCEDEVKYTIDECKERDATYAAPLKVKVRLHNKETDEINEHEIFMGDLPLMTRTGTFVINGAERVIVSQLVRSPGIYYAIAHDKLGKKLYSATVIPNRGAWLEYETDSNDVFYVRVDRTRKVPITVLIRALGIGTNPEIIELFGEEPKILASFEKDAATNYQEGLLELYKKIRPGEPLAVDSAESLITSMFFDPRRYDLAKVGRYKFNKKLALKNRISGHVLAEDVASPMTGEVLAEAGTKITRELASTIQNNAVPYVWISVEETERPIKVLSNMMVDLDAVVDVDPEEVGVTEQVYYPVLAGILEETAGDIDELKDAIKRDIHDLIPKHITKEDILASINYNMHLEYGIGTDDDIDHLGNRRIRSVGELLQNQYRIGLSRLERVVRERMTTQDMEGISPQSLINIKPVTAAVKEFFGSSQLSQFMDQNNPLGELTHKRRLSALGPGGLSRDRAGFEVRDVHYSHYGRMCPVETPEGPNIGLINSLASYARINEYGFIEAPYRKINHDDPTNPVVTDEVVYMTADEEDNYHVAQANEQLDKEGHFVRKNVSGRYREETQEYERRMFDYMDVSPKMVFSVATALIPFLQNDDANRALMGSNMQRQAVPLLFTEAPVVGTGMEEKAAVDSGVCVVAEESGTVERSTSTEITVRQDDGKLKKYKLTKFQRSNQSNCYNQRPIVFKGDRVEKGEVIADGPSTSNGELGLGKNPLIGFMTWEGYNYEDAVLLSERLVQDDVYTSIHIEEYEAEARDTKLGPEEITRDIPGVGDDALKNLDERGIIRVGAEVRAGDILVGKVTPKGETELTAEERLLRAIFGEKAREVRDTSLKVPHGEYGIVVDAKVFTREGGDEMSPGVNQSVRIYIAQKRKISVGDKMAGRHGNKGVVSRVLPVEDMPFLPNGRPLDIVLNPLGVPSRMNIGQVLEIHLSLAAKALGFNIATPVFDGANEIDIMDTLDLANDYVNLSWEEFEAKHKEELLPEVLQYLSDNREHRKLWKGVPISRDGKVRLRDGRTGEYFDSPVTIGHMHYLKLHHLVDDKIHARSTGPYSLVTQQPLGGKAQFGGQRFGEMEVWALEAYGASYTLQEILTVKSDDVIGRVKTYEAIIKGENIPEPGIPESFKVLLKELQSLGLDVRVLRDDNTEVEIMETSDMGETDFRSLIEGDRRYRNDDDEDFGKHGYSKQEFQGEELVDVEEEPESDDDFDMNFEENDDYDFGDSSDDEMAKLTTEEFIEAIKELSVLELNDLVKACEEEFGVSAAAGVVVAAAAEGGAAAEEKDEFDVELVSAGAAKVKVIKVVREVTGLGLKEAKALVDEAPKVIKEGASKAEAEEIKTKLEAEGAEVNLKMAKVELKQPVVQAIAEDVKDAVSVVLVDYRGLTVAEDTEMRKQLREAGVVYKVCKNTMMKRAFEGTDFAALDEHLEGPSAIAISKDDATAPARILCKFAKNAKALELKAGVVEGTLYDTDALNELAKIPSRDELISKLLGSLQSPITNLARVLNQIAEKGGADACEAAPAAEEAAEAPAAEMAAFSDGVIVGSAIVRIVAEHGADCVAYVKEYVQKMKAAVVEAMYPECEEIMRLAPDYHIIPVCKEIYADVITPITLLRKIVAVSKRYYLLESVEGGEKWRHFQTVMSCCLCMEVLERIVFFHKKTLYTASHLYTEFFIHYYLADMKRGKKYVEAAKTIDRGTLYDVADAVSLVKKTATAKFDETIEAHIRTGCDGRHADQQIRGAVVLPHGTGKKVRILVFAKDAKAEEAKAAGADFVGGEELIPKIQNENWFEFDVVVATPDMMGVVGRLGRVLGPKGLMPNPKAGTVTMDVTKAIQEIKAGKIEYRLDKTNIIHVPVGKASFTEEQLTDNFQTLIDAINKVRPAAVKGQYLKSVTLTSTMGPGVKINPMKLVMAKKVEGYIKLQIPAGKATPAPPVGPALGQHGVNIVEFTKQFNAKTADQGDMIIPVVITVYNDRSFSFITKTPPAAVLIKKACNIKSGSGVPNKTKVATITKAQVEEIAKTKMPDLNAATIESAMSMVEGTCRSMGVTVTEMSEAKWYVVHTYSGYENKVKANIDKTIENRHLEDQILEVRVPLEDVVEMKNGVQKVSQKKMFPGYVLIHMIMNDDTWYVVRNTRGVTGFVGPGSKPVPLTDAEMAPLGIQREEVVMDYEEGDTVQVIAGAWADTVGVIQSINMQKQSLTINVELFGRETPVEIGFAEVKKMMSGKKTQKESWFKGLNREFKKIVWPDKMTVAKETAAVVSVSVVLGAIIALVDFFAQYGVDLLIKMRTRITLECTECKQRNYNMTKDKKSHPERMETKKYCRFCKKHTLHKETKMRQCPNCKTNNPDDARFCNYCGMRLPESKEETLYSDLDELEEAPKTEFSDQEIEEESEKVIDEAKKLLNPDEKEEKEVFLQEEKKEERKEDEDTDTEQEQLKKQLTIPENLDRMIEEVTRQELEQELHRKIKLKEGSGKEQSHLDETEGVSEPTLMIGEKTEEEADEPTRMFTGDIGDFIKKKREYEDVPEEDAYEEILQSWERKRKEKKIKREREGKDPSRIPKFIKEKHSWSDLTAKQKKAVKRIVAGAAVFAAFCIFESYHGRPEAVAERYCKAYVKEDWKKTGHLSDLPKNGYATQDEYTTYMKKNAVTGVEDYQIKETKENRQIKIESGGKQRAFTVEYKTETQGKNKETVVLQKQKRQRLLLFANWKVSSDKMIANDFNLYIPAGSTAWIDGTKLTKNDKIKDDSDGLDQYKISLFEGDHKIRIDVPWFKTYKSEFKASDKGSTTISKMKVSQSGKKKLDKKMKEILSSYIKAAKEEKPFSQISGLFEKNSKYEKENKEFYDDLKEQLSSKDGYKADQITTDNYEGKYVISGVTGVVRGTLSYDYKVTYQKEDVTVGNMNGTVDGSSQMSAEFVYKDGNYQLRTVNPGSIWYRESQMRYVLGETLQEYQEEIMEKDRPSVFLATSQTARDCLEQAGMQYEGEINLKDVGFCKMETQQECLAGSLCIPKLLDILGERYKILFFINRHHIVIVDDDEFSYRLIRRIKRKKTRQGESKEKFIYNFMLEFISRDLELLGHYEKRIMDLEEGVMDGKIQGFQNAIMPIRRELLTLRSYYDEIMDMGKQLEENENGFFAKKQVKYFGVISDRADRLMSKASQLLEYAQQVRDAYKAQVDAQQNNNMQFLTVISTIFFPLTLITSWYGMNFHNMPELKHGYPGVIILSVVVMITCIIIFKRKKMLMMKTDIEIAQECTMEPITEVAERAGIPEEYLEQYGKYKAKIDYNFLKKSDKKDGKLILVTAINPTPAGEGKTTTTVGLADALQRMGKKPVVALREPSLGPVFGMKGGAAGGGYAQVVPMEDINLHFTGDFHAIGAANNLLAAMIDNHIYQGNDLNIDPRKIVWKRCVDMNDRQLRFVTDGLGGRVNGVPREDGYDITVASEIMAILCLSKDIADLKERLGKIIVGYTYGKIAEQKPVTAHDLHAEGAMCALLKDALKPNLVQTLEHAPAIVHGGPFANIAHGCNSLTATRMAMKLADYAITEAGFGEDLGAEKFLDIKCRMAGIKPDAVVIVATVRALKYNGGVAKPDLNEENLEALEKGIPNLMKHVSNIKNVYGLPCVVAINAFPTDTKAELDLVEEKCKEVGVNVALSEVWAKGGEGGLKLAEEVVRLCDEPSDFHYAYELEGTIEDKLNQIVQKIYGGNKVVLTAAAQKQAKQLTDLGFGNAPICMAKTQYSLTDDPKKLGAPTDFDITVRNLKVSAGAGFIVALTGDIMTMPGLPKVPAAERIDVDDEGRITGLFMVRADRLGSIYPEEDECCPFFTPPGIGRVGSSVSKGLEMRKDNIRSGGMNDENRYMNYEKLVQGILNIGEAMLQCGAEIFRVEDSLYRMYKSYGFMTYDVYVIPSNIQVTVETPEGEIITQIRHIESTGADYDKLNYLNAMSRYVCSHNPDEKELVRRFKKVMARPDQSELITGLAQITGGTAFAVFFGCDLQDAVVALIVCLMIVLVGRWLSRREGNPMIYNLILAFLSEVVIVTAVRSGLGHHPDRIMIGIVMLLVSALGAINGMRDVMQRNFISGSLEVMNSMLGAFGIAFGIALAMMLMGNISAEGFDVNNNTVIQLISCTIGCTGYASWFKIRGKKILYSSVGAFLTWGIYLLVYAWYPDNFFAVVVASCFVAGYAFVMSRVNHAPSTVFLTASVFPLMPGARLYYLMYGVVSRNFSLAAEHALVLLETCLGIAFGFIIVDVISRSIMRALGREYHMGKESTVIKKEKKMAGTADMKSYGKRCRKIRRYRCITDTNNFQESVFPCYIKMKKCVLNMDYNKIVQGILDIGEAMLQSGAENFRLEDSFYRMCRSYGFKRSDVFVIPSNIQVTVETPEGEIITQIRHIESSEPNFDQLDYLNNLCRYVCQHTPDEKEMREKYLEVINREPQKRITRYAAGIMGGTGFAVFFGCNVWDAIVALIVSVMIVAVGDWLAKRESNLMVYNAILSFISEVIIIVALKMGVADHPDRIMIGIVMLLISGLGTTNGIRDLLQRDFISGFINIMNSFLGAAGIAFGIGLAIMLFHEGYSDHFILNHSVPIQLISCTVACTGFAFWFKIRGKQVWYNSIGAFFTWAIYVVVFALKPSNFLATMIAAVFVAFYAFIMSRVNKAPSTIFLTASVFPLIPGPNLYYVMYGCVSQDPQLAFDETIVLMATCLAIAFGFIIVDVASRSIMYALKREYHIGKSALNLPLIGGKKMSDYYISQISHSDKTAIQGVTALLQAEEIRLDTNLDYTCGMYDDEMNIIATGSCFGNTLRCLAVGSDHQGEGLMNQIISHLIEVQFNRGNTHLFLYTKCSSAKFFGDLGFYEIARIDGQIVFMENRRTGFKNYLKKLKDSSALQLQTLTESTSATNRKVAALVMNANPFTLGHQYLVEKAARENDLLHLFIVSEDASLVPFKVRKQLVMEGTAHLDNICYHDSGPYIISNATFPSYFQKDENAVIESHAMLDLTVFTEIARTLGINRRYVGEEPTSLVTGIYNNIMSEKLPGNGIECVIVPRKTDGEKAISASTVRQAIKDNDMNTLKKLVPESTLRYFESEEAKDVIARIRNEENVIHYMEIKRPAIAGTLESSDCQVMVEAGEGKIDLSLDSAVINQYGNQIRKVVLETLFFGLMPILISIAGEFGVEATHIAIVMVVCRNCATFISLVVPATFLGVGLAGVEIKDHIKKCFFWIWGCQHYLSDIRTDPGCDQIIDIINYIVIPHKVLPLQDLRVLVLQKGIGLDGPVPSLCVLWVMNGINVTITDMMNCRDRRVSIQNELISKYDKPVLSFCMNIPGPVKTNELIRKAFDSGKAELLKALSAHNITILHTEEFHEPSGDELIMALDAPAEDIKTLATEIEESHPLGRLFDMDVIGTDGMKLSRGTYRKCIICGCQAQECARSRKHSVEELQAKIEELLNQFSIMNSRYKGIFFITLSALSFAFMNAFVRLSGDLPSVQKSFFRNLVAFFIALIMIIRSKDGFKIEKGNLKYMILRATFGTVGILCNFYAVDHLVLSDASMLNKMSPFFVIIFSFLLLKEKMSPAQALAVAGAFIGSLFVIKPTFTNMALVPSLIGLCGGICAGIAYAMVRILGQRGQKGSSVVIFFSGFSCVVTLPYLLLDFHPMSGLQILTLLGAGLAAAGGQFGITAAYYHAPAKEISIYDYSQIIFSTILGFFLFGQVPDRYSVLGYVIICAMALWMFVYNKNREMRPLETFIEQRKERFVRNSLMSDEFLDFVNKNMKPIEKQMSYYQCAIMEVETKFKVLNEQYSLEYDRNPIEDIKSRVKSMESLIKKIRKKDIPLTLSSIEENIHDIAGVRVICSFLDDIYMLADCLLSQDDITLLEKKDYIKNPKPGGYRSLHLIVSVPIFLQDGKRNMTVEVQLRTIAMDFWASLEHKLRYKKDIPADKAKYLEDEMLACAQISADLDMRMQNVRDVIAENTTPDERPLLLKELSMAKLLTAATPISYYLVVVNIVAFILYGTDKAKAMHHQWRIKEAVLIGIAFVGGAFGAFAGMIVFHHKTRKMKFRILVPIAIIIWLTFGGFLAGRDVVGLTKTDRPKNEYNGTEITPYHSSVDKDGDGTDDQTDILTNALVYVKKRPVYKSRYYQTGYPDDRYGVCTDVVGYALKKSGYDLRELVDEDIRKNPKDYDIDEPDKNIDFRRVKNLKIYFEHTAISLTTDVNDIEQWQGGDIVVFKNHIGVISDRRNVEGVPYVIHHNDPYQKNYEEDILQERTDIVGHFRISMNIQEMKEKKKEKGYTNEQIAEFSGVPLGTVQKIFGGTTTSPRYDTLKALEKIFLPMERERYYASVVKDASAAYTVKRQGEYTVEDYYALPDEQRAELIDGVLYDMASPETLHQMVGGYIYARFLEFISKNKGNCIPLIAPLDVQLDCDNKTIVEPDVMIVCDRDKLYKNRIYGAPDFILEVLSKSTRRRDMVIKLQKYANAGVKEYWMVDIEGRRVFVYIFDEENYPVIYGFDSKVPVYIWGGQCEIDFSEVYNYIGFLIESMESVNLKALTKTEIFAGATEEEVSSMLNCLSAKKKKYQKDEIIFHAGDIVSSIGVMLKGNALIENDDIWGNRSVLDYVKEGQIFAETYACALDEKLMVNVIAMSDCEVLFLDVRKILKVCPNACEFHQNLVQNLLAISAQKNLNLSRRIFHTSSKTIRGRLLSYLSYQAMEREKEEFDIPYNRQQLADYLGVDRSAMSNELGKMQKDGLIEVKRNHFRILDVDMEISILLMEQIAELFLMILMGYIIVKTGLLKGEDSKVISKIVLYLVIPCVIINAFQVDYTSEKVKELLLVFVASVLLQVILLAAVWGAGKVLKLNEVEATSIYYSNSGNLIVPLVTFILGKEWVLYGCVFMSVQLVFLWTHGKNTISREGKWDWKKIVFNVNMISVFAGVVLFFTKIRLPEIVDQSLSSVGSMIGPASMIVTGMLIAEMNLRNIFENVKVYFISFLRLVVIPVISLAILKISGLVNIHPDGKKLLLIVFLAVITPSASTITQMCQVYGNDSKYASAINVMTTLLSIITMPLMVLLYQTMMMKYKNIIFDFGNVIGKFKGDYILGKFASTPEDYNILADAIFKNWAALDAGTIDYDQNAEDTIAELPDRLKDTARDFFENWFQYVDPLPETWEFIKELKARGVPIYLLSNASTRFAERAPEDYPILKEFDGIVFSAPLKMAKPGHDIYYHLFNKYDLLPSECFFIDDTVENVIASKELGMESILFTGDIEAVKRAIEFMNYTERKAKNQVFFYITSGSGFMTPLISVLIILGAVSTAVNMVAAMVKRLLKKGNMPKNLFQNVIFTLMMSFLMVYVMICYNICLNVGGMSNEVFLMAFGELKIMWPVAFVLEFAFVDKLAHMLAFRIVTPQDRPIFITLAISSMIVCIMCPCMSLVATILFKNAGSNVIATWCQTTFMNFPVAFFWQIFYCGPFIRLIFRKMFPEKENASAVTEMKRKSKNQSKNKTLNFLRYLGPGLLVTVGFIDPGNWASNIAAGSGFGYELLWMVTLSTVMLIVLQHNAAHLGIATGLCLSEAASRYMPRLLKDLILLTAMFAAVATAMAEILGGAIALQMLFHIPIRLGSILILVLVLFCAFTNAYKRIEKLIILFVSLIGFSFLFEVGIAKIDWGAAVVGWVKPSFPSGSMPVILSVLGAVVMPHNLFLHSEIIQSRQWNLEDSSVIEQQLKYEFKDTLFSMIIGWAINSAMILMAAATLYQNGSGKQVDDLTVAGKMLSPLLGNAATVVFALALLLAGISSSITAGMAGGTIFSGIFNQPYDIKTKETKRGVLLTMIPAAVIILFIRQPFEGLVYSQMLLAVQLPVTIFTQIYLTASKKVMGKYVNSRRLNFLLLVIAVIVTGLNIALLFVMTVPERLSALRKCMEEKNIDVYVVPTADFHQSEYVGEHFKARKFITGFSGSAGTAVITKTEARLWTDGRYFIQAAAQLKGTTVELMKMGEPGVPEMNAYIEEVLKEGETLGFDGRVVSVGEGEGYAAIARKKNAKVNYQVDLIDEIWEDRPVLSEEPAFDLDVKYAGETVASKLARIREEMKEAGTNVHVVSTIDDICWTLNIRGNDIDFFPLVLSYGIITMDSFELYIDERKLDDELKAKLAKDGVNLHPYNDIYEDVKKFGSDVVAMIDPGKLNYALFNNIPENVKTVEKRNPAILMKAIKNPVEIENIRKAQIKDSVAHVRFMKWLKENVGKMKITEMSASDKLDEFRAEMGNFIRPSFEPISSFGEHGAIVHYTSSPETDVELKEGQLFLTDTGAGFYEGSTDVTRTYALGEIPQIMKDHFTLVAISNLQLGSAKFLEGSTGMILDILARKPFWDRDLNFNHGTGHGVGYLLNIHEGPAGFRWKYRKGETEVLQEGMVITDEPGIYIEGSHGIRLENELLTCKGTLNEYGQFMYFEAITLIPMDLDAINPDIMTQEDKKLLNDYHAKVYEVIAPYLNEEEQEWLKKYTRAIMKEEIRQKLTGAVIGLARTCENNEKTENTNRVFLEALTVAGDWSASIFDMSEMLEKVRNEKYTVSPGCVTCAAPCGNTDDYDMENLWKESEEIGAFKNTILMVICQTAAKLYHADQTEESETVKLLFRALCMISFEGWDVAGLTPVMVELGKAGRIMKKGNAIALLPIGVFLCIYLGLGILFEYVMKIPMGFYNVPIIIAFLAAILVACLQNRKVSFDEKLEIMAQGLADKNIITMLLIFLTAGAFVGVVGRSSAESVAYFMLSLIPARFSVAVLFVVACFVSVAMGTSVGTITLITPIAVSVSKASGFDMALCIGSVMGGSMFGDNLSFISDTTIAACNGQGCQMKDKFRENFGIALPAAIATLVLILVLSFQTDIAGRVSKSYNLVQIIPYVLVLIGGIIGINVFMVLLIGIVSGSIIMLAGGHIAATDLLANMGSGASGMFETSMVAILVAAMCALIREYSGFDALLAGIHKVFKGRKGGQLGMGLLVGTMDIATANNTVAIVMANPIAKDMAEEYGITPRKAASILDTFSCVFQGIIPYGAQMLVAISAASELGYNVSAFQIMPKLFYPFLLFVSSMIFIFVIPAKKERMNKRESFSSRWGFICACIGSAVGMGNIWMFPTRVSLYGGGSFLIPYFIFVILIGSTGVIGEMSFGRAAKAGPIDAFGIACEKKGKRKVGEALGMIPVFGSLAMAIGYTVVMGWILRYAVGTFTGATLSPENVDEFGAAFGKMASAFGNNIWQILALVACMLILMLGVGSGIEKANKIMMPIFFALFVILGIYVGFQPGASEGYRYIFRVDPEAFKDPATWIFALGQAFFSLSVAGNGTLIYGSYLSDEEDIPASAGRVALFDTIAAILAALVIIPAMATTGAQLDQGGPGLLFIFLPNLIKGMPGGWLIAIIFFVAVLLAGMTSLINLYEAPIATVQEKLKLGRVPACALTGIVGVVVSLLIQGIVSDWMDVLSIYICPLGAGLAGIMFFWVCGKAFVEKQVNTGREKPYVSWYHTVCKYFYVPVCFIVLILGIVLGGIGMRIEIPGYKTMDLKYLILDYNGTIAKDGIIPESVKERLKKLSGIYEIYVLTADTHGTARKICEGLPLKIQTFPGNAAAEEKRKIIEQLGGKRCIAVGNGRNDLPMCRIAELSVGIIEAEGAYGRLIANVDICTRSIEEALDVLAMPKRMVATLRGMLTIEQISCGFGRQEILHDISLTIPEGKITAIVGQSGCGKTTFLKTLNRMIEEEGGFYKGKIILDGEDIKGLSTEVLRTRIGMVFQQPIAFPYSIEKNLSYVLKYHGIREAREIERITRECLQKARLYDEIKDQLKKSAKKLSGGQKQRLAIARSLCVNPEILLLDEPCSALDMKNTIAIEETLLELKGKYTFVIVTHNLAQAKRIADQIIFMDQGRVLEVTDTKTFFEHPSSEPAREQIQYMMKNKLTKYVIRILAGILGILTIAVTLFLFLYIFWKGKNVMSLSFILDKPAGVPLGTAGGIYPALMGSIYLGALSALMGGIIGIGVAVYLVFYTRKSIFYHVISACITGLSGIPSILFGLVGYTLLIYQFGLGRSLLCSAICVAVMIVPFIAIRAEKILKEKGTEYMKNSLALGMSREYAVIRLILPVCAVELLGTVALGMAYGMGAVAPILYTGAVMVADVPGKLTDPFMSLPYHLYMLVNNGFSLDYAYGTAFVLMLFLLLIQIICKCITYIRKDYMYRKIANTFCKVLIYMIAFVVAALMGIMLIHILKESIPALREVGIKMFLPSSEWRPVSAAPQYGLLPAVTGTLYVSGLAVLFAMILGVACACFLTFFMPKKLASVCLAFIDLVAGIPSVIFGFIGLTVLVKAFVKYLKMAAGQCVLVAGIVLGIMLLPYVVSTCQESLVNAKRTYEKSGLALGLSREYVLIKVILPAIRPGIVASAMMAFGRALGETMAVMMVIGNSAIFPKLLGRGQTLPALTALEMGSIEYGSIHLSVLYVANLVLLVILVVVTLAGQLLKRRFAEHEKMKKKLMSVLLAAAMVASMAVGCGSDKKASSDSGDTKKTESTEKKTESNQILFNGSSTLAPVITSIATDFFDTYGTWDAYDSSLPKEDIAIYVSAGGSGQGTKAVIDGTSTFGMVARSVKDEEKEAIKDEKEYQVGIDALTIAVNPENPVTGVLDDLSTEQIVSLFSGKYATWKDLDPSLPDEKVVVITRDINGGAHEVFQKNIMGDTEVSSEAIQASSMGELVQDIIDNKYAIGYASFGVANQNAGKVVTLKVNGVEPTKENIIDGSYIIQRPLLIVGSGDPTDVQQAFLDVILGETGQKTVEDMGFIPMKMNEYRIGTKCVQGGYTPGNGEPRQIPIVQSTTFKYATSEDMGKLFDLEASGYFYSRLQNPTNDMVAAKIAEMEGGTAAMLTSSGQAANFFALFNICECGDHIVASSSIYGGTFNLIDVTMRKMGIDVTFVSPDATEEELNEAFKPNTKVMFGETIANPALTVLDIELFAKVAHAHGVPLIVDNTFPTPVNCRPFEWGADIVTHSTTKYMDGHGAALGGAIVDSGKFDWMAHADKYPGLCTPDESYHGITYAEKFGKEGAFITKCTAQLMRDFGSMQSPQNAFILNLGLESLHVRMPKHVENGQAVAEFLEAHPKVAYVNYSGLPSNKYYERAQKYLPNGGCGVVSFGLKGGREAASIFMKTLKLGAIETHVADARTCCLNPATSTHRQMTDEQLKEAGVPAELIRISLGLEDKEDLIADISNALDAIMNKNRKMKRKIAASVAVGMSVMMGVTPAFAANGTSNSEVYKEETVYVNAKASGKTDKVTVSNWLKNSGSVSGDLEDESTLSDIKNVKGDEKYTSDGDKLTWATDGEDIYYQGTTDKKLPVSVKLKYYLDGKEMKPSELKGKSGHLKITVDYKNNEKKNVSVDGKDTEVCTPFVMMTGMILPNETFSNVTIDNGKIISDGNKNIVVGFGMPGLKDSLNLSSEESDKVTIPESLSIEADVKDFTMSSTYTVALSDLLDDVDMDSIVNVDDLQNALDDLEDAALQLVSGSDTLADGAGTLADGVNSYTEGVDTLNAGIQKYLGSNGELNGSVTEYVNGVNKVVKGVQDYTSGVNTLADGVSSYVDGEKQLAAGASQLTQLSTGLKQVQSAISQLEAATDGKGATTEDLQAASKALAAGTAQMKAALGTEEVKSLMSQVNSMVTTGNTLMKETKTLSGTLTEGIEKPLTTIGQTLQSMQESLKNIDAAQTALQNACKNINEVVASDNQTIKAAKTAAKNSSDSIATSIKTLEAKYAGISDKNSEEAKQLQSSIIALKSAKASTDSVQNLKELTGIDTTKMPTIDVDSLKAGAATIMTNAATLQKSSEALSKALPELKKQLKSIEDAEGVLAQAGQLSTLTGSVDQLNAGMQGLNSAIGTLHSNLATLNNATSAQFPTAIRGITALNKGFAQLSGYNDSLVGGANKLRSNSPTLVAGVNTLKSGTNQLASGLNTLGSQMSSGSATLAANSGALRSGASELQSGAKELAEGMAKFDKEGTSKLKSTVEDELGDVLDRIDVLTSENCKYSTFSGKDKAMDGNVKFVIETDAIEMVKVGKWIARHRILMLLIGVLLIIPSVIGIAKTKVNYDLLSYLPDHLETVKGQDILVDEFGMGAFSMVAVENMDMKDVQKLEKEFEKVPHVQDVLWYDDVADISLPTEMIPKDIRKAFINGDATMMLVLFDDTTSSDNSMEALTQLRKIANKQCFISGMTGIVTDIKNIAMKELPIYVVIAALLSLVVLEITSGSFVVPFLFLLSIGLAILYNLGSNIILGETSYITQALTAVLQLGVTMDYSIFLLNSYEENKKRFPGEKERAMGHAIANTFKSVVGSSVTTVAGFIALCVMTFALGRDLGIVMAKGVVIGVICCVTILPALILVFDKPIEKTRHKLLLSNMDRPSAFITKHYKVWIVAFLVLLLPAIYGNNHTKIYYNIADSLPATLNSNVSIKKVKDDFGTSNMHIVMMDKNMSAKDKQQMFKKIDKVKGVKWTISMSSLIGPSVPDSMIPKDVRKMMQSKDYELAFVSTKYESATDPVNTQIKKIDKIVKSYDKSGMVIGEAPLMKDLQDVTDVDLVNVNIISIAAIFVIILIIFKSISLPVILVAVIEFAIMINMAIPYYQGVSLPFVASIVIGAIQLGATVDYAILMTTRYQKERSRGKDKMEAISIAHKTSMPSIISSGLSFFAATFGVACYSQVEMIGSICTLLARGAIISMVVVLLVLPAMFMIFDKLICKTSIGFLGKKAKAQTSEAKMKALQKVSKFLSDYTSIVVIAIAVVTFFLPSMMGWVNLALFTDMVSNKFTCQSIIIGIIMFSMGLTLTTEDFRILAQRPFDICVGAVAQYLIMPFLAFALSKVLNLPDGIALGLILVGCCPGGVSSNIMSYLCGGDVAFSVGMTTVSTLVSPVMTPLMVSLLASGTQITIKGLPMFVSIIETVILPVGVGFLLNYLLGKNKTFRELQKVMPGVAVLGLACVVGGVVSSQGAKFFQSGVVIFVAVLLHNGLGYLLGYGAGKLVGMNTSKKRTISIEVGMQNAGLATNLATTTAQFASTPESAIICAVSCTWHSISGTLLAGLFAMHDKRKEKVAGNAEAAAHMTEHEQNSKFTKNKRQDGENKMDIQEWIIFAIELIGTVAFSASGAMVGIECSMDIFGVIVLGVSTAVGGGMVRDVILGKVPSALLHPVYVIYAVLAAVLVFCIIYFRRKYLQDGFGEVYDKLMLAMDSVGLGIFSAMGVTKGISCGYIDNTFLLVFLGTMTGVGGGLLRDTMAGVAPYIFVKHIYACASIAGAWICVIIYRSYGELPAMVVSSLIVMLIRFLAAHYRWNLPRIGEMKPDKIKIEDLEVFANHGVFPEENVLGQKFVVSAVMYTDTRRAGLTDELTASIHYGEASAFITEYLKSHTFKLLEKVAEGLAEEMLVRIAGLQKVQIEIKKPWAPVGLPLKTVSVEIEREWHTAYIALGSNMGDSRSILEAAVQALDEMKNTKVEKVSTFITTPPYGVTDQPDFLNGCLKLSTLLYPEELLKELNRIEKEAGRERIIHWGPRTLDLDIIFYDDLVAETDTLCIPHVEMHKRAFVLEPLHEIAPYKRHPVYGKTVREMLEDLRKMIIGGKNFDTANHTYIMGILNVTPDSFSDGGKFNGMDAAIAHAHQMVEEGVDIIDVGGESTRPGHIQITDEEEIARVTPIIEVLKKEFDVPVSIDTYKSHVAEAALQAGADLVNDIWGLKYDKKMASVIAKYQAACCLMHNREKAEYQDFLKDFMDDMKECVRLAKAAGIEDDKIILDPGVGFGKTYEMNLEIIDKMEILNELGYPVLLGTSRKSVIGLTLDLPVTQREEGTMVTTVYGVQKGCAFVRVHDVEKNKRAIQMTKAIMRGHEVMKRVTERQKGMPRLNAVVNHEVYQTYYKRICECETDRVFCCHQMNHLLDVARIAYIKNLEEGLGFDKELIYVAAVLHDIGKSFQYRQQIPHEIAGERIARRILDSLPTGFTFTDEEKALICLAVRGHRRRHEHMKPIEELFYESDKRSRMCLSCMAEKKCNWNEEEKNMEIIIMIDHEKIEQAVRLLLEGMGEDVNREGLIDTPDRIARMYEEIYGGMDEDAGKHLSKTFTVDSHEMVIEKDITFYSTCEHHLLPFYGKAHIAYIPDGKVVGLSKLARTVEVFARRLQLQEQLTGQIADALMEYMQPKGAIVIIEAEHMCMTMRGIKKPGSQTVTIARRGVFETDLVLEERFFRMLGRMTYKEARVYLDEMSKYGSVLGLDTIRGLLRELGNPQDDLKFIHIAGTNGKGSVLAYTSMILSKAGYKTGRYVSPTVISYLEKIQIDGKWISESEFAEIMEEIKEAIDRLVCKGEPVPTVFEVETAMAFLYFKKQKCDLVVLETGLGGETDATNVIKNTVCAVFATISVDHLGVIGDTLEEIAQTKSGIIKPGCTVVSARQQENVRLILRKKAESLNCIYTEAEPEQMSIEKEDYKGLTFSYKKYAHMQNHIAGECQRENLSVALEVIESLRKLGYQIEEGAVRDGLDATRWAGRFTCLSEDPIVIVDGAHNEDAAKKLRTSIERYFTGEELILIMGVFKDKEYEKIVQILCPSAKRVYTVDLPNKERTLPAEKLAECVRDCMTEQLSVYAEKSIGDAVAKAYTYATEDSGKRAVIACGSLSYLSEVIRCMEGCVQNPQRKERIMITWNNLDTLASFKELEKVERVNLVEAMTGESGAERVKNYSVPMAEGLTYNYAAKQVDDKILAALAKLADEAQLAEKFEALYNGEVINTGEKRLVLHHMTRGQLGETVEADGVDKRTFYTEQQAKIADFANKVHAGEITNGAGEKFTTVVQIGIGGSDLGPRAMYLALENWAKKNDTFKMEAKFISNVDPDDAAAVLNSIDVAHSIFVLVSKSGTTLETLTNESFVKDALKNAGLDASKHMIAVTSETSPLAKSDDYLAAFFMDDYIGGRYSSTSAVGGAVLSLAFGPEVFAQFLDGAAAEDALSKNKDVFKNPAMLDALIGVYERNVLGYPSTAVLPYSQALSRFPAHLQQLDMESNGKSVNRFGEPVNYPTGPVIFGEPGTNGQHSFYQLLHQGTDIVPLQFVGYKNSQMETDVVIQDSTSQQKLCANVAAQIVAFACGKSDENRNKNFEGGRPSSIIIGEQVNPGSLGALLAHFENKVMFQGFVWNVNSFDQEGVQLGKVLAKRVLAHETDGALKVFSDLLNIEQAREILLTNYLYYGVMMVKMKDADGMVSGACHSTADTLRPCLQILKTKPGTKLVSAFFVMVVPDCDMGENGTFVFADCGLNQNPTSEELAAIAQSSAESFKQLVGADPRVAMLSYSTMGSAKHDDVTKVQEAVKIAKAENPDLMLDGEMQLDAALVPSVGAAKAPGSQVAGKANTLIFPNLDAGNIGYKLVQRLAKAEAYGPMTQGIAAPVNDLSRGCSAKDIEGVVAITAVQCQNQMKVLVMNCGSSSLKYQLIDMENESVLAKGICERIGADGSVLTHKPTGKDKYVVEQAMPDHGVAVQLVLDALQDKEHGVIESADEITAIGHRVLHAGTIYSDATLVTEDVKKVVRDCFDLGPLHNPANLIGIEACEKAMPGKPNVAVFDTAFGMNIPKKAAMYAIPYEYYEKYSIRRYGFHGTSHMFVSGETVKLLGKEDAKVIVCHIGNGASISASIGGKCVDXXXXXXXXXXXXXXXXXXXXXXXXXXXXDLLLWKDLLWEHVVEMLILQFFSSSAIMKISAMLNILNKKSGLLGISGVSSDFRDVRQAAADGNERAQLAMDTYKYRVAKYIGSYTAAMNGVDAITFTAGVGENAPDLRKDICDYLGYLGVELDEEKNENVHGETTVISTPESKVKVIVLPTNEELAIARETAKLVMILNLSDVLSEQHKAIHESVPIEMTCFKSEMGDYAITEKTPLELSVEYAGDRKLEVTGKAEITSVAPCDRCLEDVEVKVTLDFKHKIDTESDAYDQSEDLDENNYIDGYSLDVEQLVYNELLVGWPTKILCSEDCKGICNVCGQNLNKGTCNCEDTGLDPRMSVIRDVFKNFKEVMSICPKNKSSKARRDKRRANWKMSAPNLVKCSKCGELMMPHRVCKACGSYNKKEIIAQDMKNDKKETISFGCLFFVMHSEEATVGRFCRCNLNMQKIFFIKVFCIMTEVAKRIEKLRALMAEQNIDAYVVPTADFHQSEYVGEHFKARKFITGFSGSYGTAVIAKDDAGLWTDGRYFTQALTEMEGSGVRLMKMFVDDTPSTTEWLAQKIPEGGKVAFDGRVLSMGEGQEYEEVLGAKNITIEYEVDLIDQIWEDRPSLSKKPCFFLEDKYTGENVASKLKRVREKMAEYGATVHLIASLDDNAWLLNFRGDDIDFFPLVLDYVIVRKDSVDLYIDDSKLNDCIREEMAKNNVNIHPYNDIYEDAKKIGADEVALIDPMKMNYALYKSLPCKVVEGANPTILMKAIKNAVEIENIKNAELKDSIALTKFIYWVKKNYDKMEITELSASDKLTALRAEQEGYIRDSFEPLQAFGEHAAMMHYAPSKETDVVLKEGGMLLSDTGGGYYEGSTDITRTTVLGHITPELKKYYTAVYRAMQHLSAANFLYGNHGWSLDVLARQPIWDMNKDFQCGTGHGFGYLGSIHEPPTGFRWYIVPSKNEHHQFEPGMVITDEPGIYEEGDFGIRIENNLLTVNGEKNKYGQFMHFETLNFVPIDLDGIDPEELTRSEKEWLNDYHKACYEKVGPYLTDEEREWLKEYTRAIMAKITEGYMPFHGYQTYYRIVGEQKDNGKAPLICLHGGPGSTHNYFEVLDNVADDDDRMIIMYDQLGCGKSYLDGHPEMWTQDLWLDELDALREHLGLDECHIIGQSWGGMMQIAYAIERGAKGVKSFIISSGHPSSSLWAREGMRRIKMMTEEDQAAINDALERNDFTGEAYLKAVDNYMDRYCNYWREDLPECCTRPKKSGGEAYLYGWGPNEFVPSGTLKDFEYIDRLHEIKVPSLIMSGISDLCSPLVAKTMADEIPDTKWILWERARHTTFVDRHDDYCVELIKWMNEYDKMEKEKNNRSSFSGKIGFVLSAAGASVGLGNIWRFPYLAAKYGGGIFLLIYILLALTFGYTMIVAESALGRMTRKSPVGAFKAFGKKAGWLSFGGWINAIIPVLIVPYYSVIGGWVIKYFVEYLKGNGAKLAEDGYFSNFISNGLSTEICFIVFCMFTLIIIYAGVRNGIERVSKFMMPILVVLSVIIAIYSVTRPGALAGVKYFLVPNPKNFSWMTVVTAMGQMFYSLSIAMGILVTFGSYMKKDTSIEDSTRNVEVFDTAIAIMAGLMIIPAVFAFSGGDPDTLQAGPSLMFITIPKVFDSMGFGTFAGILFFLLVLFAAVTSSIALTESAVSTVEDELKWSRKKSTVIVGFIMIILGTLSCLGNVKVDKDGAYYIPQKDLTAVDDALFPEDSLMTKMHRGKKAAASLMAGILLCQMFVFGVSKTSADAREVAKKMSFEVVGEGIVTVTDTAERTQEITSGSVIEVPKGMCVRVQAESPKETDIAVHVLDKDGNYELEDVSEVQGKCFWRDVTAMELEKKVVVTFGKEDKKIRAVRTGQTRGNYNKPEAGDVFTGNCVITAVDGGNGHTVHSVTIGGFTGILAGVTATGGCADHTAAAPYVGQEYTYRYTVTGVNKVTGEVMGNLYCTSVTGATDGVTKDSDGRLIGYQRISGSALIYRNYSGYAKLKKGKTQTMLTNGNPQYSLEDACYGIYKDRSATNEAATFTTDKEGNSNTVELEEGTYYVKEKKAPKGYRLDETVYPVTVVSGQTVSVNVKDVPVYSDMELILEKIDQEYKAGKSHGAGSLEGAEFTVCYYAGIYDQATLPKTPDRTWVLKSKKEKDRYESRLNKDYQISGDDFYYAEDGKIPVLPLGTISIEETKAPEGYSLDGAYIESVEGKTEGTYYLTKIIQDGNLAKIQGGNTYKIADRIFRGDIEFQKKDEETQESMAGIPFRITSVTTGESHMIMTDANGYFSSASNYVKHSENTNTGQAESGIWFGLNSGGEMSEVNDDNGAFPYDTYKMEELRCGQNVDKALYKGTFKISRDNYILDLGTIMNPDLVISTVAKDEETGTHYSNADESVTVIDTVTYTGLKKGKEYVMKGTLMDHKTGEPVLDSKGKKIFGLQKFIPKTAKGSVEVEFNFDGNTLAGKNITVFEECYLDEELIAVHKDIEDVSQMIHFPELKTSVKDDQTGIHIIKSEKDMQITDTVEYHNLKKGKKYKITGILMDKDMDCGWEDLGEKVVDISSKFVDNLLNLMSFSYNEEAIKLITEESLGRFQNLAKKLAEEIQNGYYCQYEDMENVISTIRNEFIAIATICRQTNSNECMKERMIKYPLYVTLDTNIFDANKLDFSQDSTLGLLINHVKAGKIKIVLSNIVLKEVEKHIIKASDGVCSSFRGLRKDLINGVSDKFLEEIGIKTDLLMLNKEEYRTKSLEMWKKFLKKLNPEILNLSLVDLDGIVSDYFAINPPFESSEKKRKEFPDAFIANQIRKRFCENEVIAIISDDKGLKKACGYSENHIFYQSLGELYNAINRQEREYKEIVRIINSLIGRYFSEIEEKIKNEDCLEVHGLSCDSDGIESGYDYSDAEVVSIRGISSRVRSIDEIKDETAWATLLCAASIDVVCSYEDYDNAVWDSETRSYYCLETRKNLEKHMARFGVRIELDRKENNLKIVPFKVILNSDTIHDCFEIDEDEEEYDEMDIINQERDLYGLCSLDKYEDYLNEELIDSSFMNDIVAKFEKINDLYQEYEDIACIYDEFLSIIRDTEKSYSIKQLVLGMKDIKGFPVSTDTNNITSDEKEEIDSWADQSYERLYKLSEQQRLPDNFEYGDTIEIHNGMETYQFNIGEFSGAVEAGDQEDIPLSIEDGEGNVISKGHVILTVGYMDFDEDGGAGDGIEDEVEYYYENILNTLEDIAELIEQDVKREKSITDKIEKYSKNKRVQKSMDSKETFENTKQELQNVDTVIDIKHNPVVTAFISSIKKVPFIGDLIDDSLECTLEDLQDKDFMEKIRDKVGMGKEPEEIAKEQRGNELDMDEGMMMAGLSMFENGFMNDVGANLFGKNITMNEREDEVKMKMKFKRILVGVMAVATLASVIVQPMTVSASEKEPEVTGATSSLDASVKISVGYSIMTMRKFITKGVLPLILFRIITWLGQYIFMVDGSIDWFQFRLVYGVPIGIPYMVIIISIKMDLSGTTRVLALGILIGAVFGFFIAAGIAVRAIMLASVKNDKVKIGDNLRIVREEKSLTQEKLAEKMDVDRQTVYRMEKGNYSMETFLVATLVLKVNLQDLLPKRYVHIEAEKSESQVDNICNEIRQMPEQDQAFVVGAMQNAKEYLEFTKKQKHMRNKDDELRTQHYNVRVGDKAWVDGLPAFLVKGGGNKKDTYTIKEFLAAFYGEKCRCIIIDPNGGIVVIEMNVKNFVGKTVHFLGGVRKVPMKALRKKQYYNRNREKVHCWCVKMNNQEYVEKILELIKSHMKQNNITQKKLVELCKGKKIKISQGTISNAFNTPSSVRLTTLINICDGLNISLSTLMKNIELSLKLPEPSDNLIVYDTSDPAYRGYLNSYHVYFLSTDEKKVGELVHGILNFKNSNTPGPCKALLELNTGDQDPYTKKIHIKKYTGDMIISRVGCIYCNLISYEYGDIWTLVFNHLQLNFDSFIGGIGGGITSSAGGTRIPTIHKVFLSSTELTEDQQFYVCGLLRLYRDEITISTQQLNTLMNDSKLDLKFKRNIERILAKPEIFYSIPVESLKSSVPNKNYVKMLSMLLQYSSMPYNDKITMAETDLAQYIIRPSEMTLTYRYPVVYFYGDEEEDSEIVQKEGRIEPLKTDKEPYEAIVSAEGYSFHILFGSQMSGMFLCIPGWHMGCELSYLNDIFWNRESISGSDESFGYENATAIAYALKELNELVGMEHPFGTIKRSLGYSFFLRRRQENVDAEAASMFIAYNFKRLLSMFSTEELVTKFEESVMMAYIVGTDRYQTRMVTTSLDDLISKDNSVRVIDSYVESLNLETLGFIEYSGRNRGQSPYRRFDLLKLHIYGYLNKIRSSRALETEAKRNLELMWLINCITPDHGTIAGFVQKNKAVFHNTLRNLTLILKGWGLIDGEMIVIDGTKIRAQNSKHNCITQSGLDKKIEYAEAQINAYLMAIVKDEVLADDLTDKLKTYQELKKQYLTQKQELKDKGLEQKSLTDPDSRRMKNNGSLDICYNVQFVVDAKNHFVVDISTTNDINDQNQLYTMAQKASELLEKESSTVLADTGYYNGTEIKNCVDAGMNVFIKKAKANNATKNNEFRKEKFIYNGETDEYTCPAGDRLRFFENTSKNGMKYRKYKCTDCNSCKYKKDCTTSSSGRMIQRWVYEDVSWSIHLGLMTKFIEKPTAITPNRELQSDEYFNETDHLIYCSKCNTPRQCRHELQGKVLIPSIRCKCQQEIFEQEEAQRKLHEKQMEIEHLKTSGLQDKALYDYTFARDNGINPEIKLAHNYVSNWEEMRANASGLLIWGDVGTGKSFFAGCIANALLEKGVPVLMTNFSRILNTLTGMHFEDRNQFINSLNRYSLLMTVKTALAVLEKQELIFRKRQGPGQPNRIYVKLPKETIHYTDRFLSLRQTKNCPIDRQDSFPDTDRKLSGNKKEIKKNNLAIRGSKEPLSPYGKFQNVFLSEKELEDIRQTIPDWKDYIERLSGYMASTGKQYQNHAATIISWARQDHPASRQRNYESEEYETLMEINETAKMLYIILLDRARLSQKNEGWSDIDGHVFIYFTIEALAEVLHKSQMTVKTALAVLEKQELIFRKRQGPGQPNRIYVKLPKEAIHYTDRFLSLRQTENCPIDRQDSFXXXXPQKPDDGMQNNIRNTNLRFNLDKEQQRRAWEYLQTMDRQDFKSYSQVISLALVDYFDRYYRTQADPYLETREREELFVKQIIDAVENSLKQALPLFLSGLTAGMVQREPQIRASFPAPENSLPDSDVDWDFLGEMMYNPQLDTFICVVEAGSFSKAAEELYISAPAVIKQINSLENSLNLQLFERTHRGLIITEAGKSLYQDAKYLIQYSKESLIRAQEAMNHNEEIIRVGISPMTPPEVFVELWPKIQKIYPEMKFKLITFENTPENAREILANMGKNIDVIAGIFDETMLELRGCDGTEISREPFCVAVSIHHRLAKKEKITLDDLAGENLMLMRRGWSYYGDMLRDDMMKNHPEINIVDFNLYNVEAFNRCENNNEVLLAFKSWESVHPLIRIIPVEWDYTMPFGILHSKKPSIKVKRLINAINKVKMQIKRIALGGIIMTVIMFSGCSTTVHNLAIVEEKTLETGKTEQESVTEKDINMNEKESFNAESNINDVIHDSAFDDYGRLIFPVDMEIEDNLKLKDVSSILPWYSEVNTDKTVEIVNYMKNQAMNGEQIFYPIYSEEEMQADADKKDTGLFFFRGNAGAKTTIINAGGGFVYVAGIHDSFPHALELSKKGYNAFALIYRPGAQTACEDLARAIAFLHENAEKLQIDMTDYSLWGGSAGARMAAWLGSYGTAYFGEKEYPAPAAVIMQYTGLSQVTGMEPPTYACVGTSDGIASYRSMEKYISQIQQNGPNTKIEVFKGLSHGFGLGEGTVAEGWIDRAISFWEDNMNALDKRMKNKRFTAKILIDIGMTICLLLLMPYSLLSETAHEWIGMAMLVLFISHHILNHKWVTSVRKGKYNAFRVIQTVLVIIMLILIMGSMISGILLSNYIFKWIKISGTYMTARQIHMFCAYWGLVVMSLHLGFHWNIAVAMAGRLWEHPSVIRTWAARSVATTIAGYGLYAFYRRQIGDYLIMRMHFVFYDYEKGIFPFLLDYLAVMILIAFIGYYSGVFLKKTGKRKRKGSYMEKRKLVLTIIGVVILAMVIMVYIYFSKPGKDEKKNQQTINQVQTVQQKTNEKKENTEKNTSGDELENVTPGSEEYRGFLLDNVLHSPNEGDIHYNVYIPDAYDGTKEYALYVTLPGYQGLYFQGVGENIRTEDFGFEAQKYITDMIIVAPQLNDWGQTSADQTIELTQYFLTHYIINPSKVYINGYSGGGETLSLVLAKQPELYTAALMCSSQWDGAYEPVVEIKTPVYFVIGESDEYYGSEPFKKAYQQIHELYKEQGLSESEIDKLVVLDVKDKDYFEGTPVTYQHGGGYLFCRDKEIMGWLFNQMEYISLNNGVKMPILGYGVYQVTKEECERCVLDALKVGYRAIDTAQSYFNEEEVGNAIQKSGIPREEIFLTTKVWVEHYGYEEAKKSVLESMKKLKTDYLDLVLLHQPFSDAYGAYHALEDLYDEGKIRAIGISNFYVDRMVDFASFNRIKPMVNQVETHIFNQQKEMKEWADKYDIRLEAWAPFGEGRGGTFENPVIAEIAEKYQKTPAQVMLRWHIQRGVVVIPKSTHIERMEENFNVFDFTLSDEDMKTIAELDKKTSSFFSHQDPNMVEWFVKMVEERKKNNDSSKEKKNWMKVLLVNGSPHKNGCTYTALCEVSSALNENGISTDIFWIGNKPISGCIACRKCQEKNKCILDDIVNEFLEIAGDYDGFVFGTPVHWGGAGGAITSFMDRVFYADLNGGGDRFRLKPAAVVISARRAGTTATWDQVNKYFGLMQMPIITSRYWNMVHGTNPDEVKQDLEGMQVMQILGNNMAYFINCKNVATKMGIEMPKAPDFVFTNFIRMKTKKIAAVLLTCIVAIGLMAGCGASNTNQSASNNDSQSTSTNQSGNEEADTNSENTTDTTENTSTGNGKTLVVYYSASGNTKDVAEKIAKITEADLFEIEPVEPYTDDDLDWTDDDSRVSREHDDESLRDVELVSTTVDNWDSYDTVYIGYPKMEYSLMDMEMEKRKFLNLCGKRDRALLSGEKRMTLGDMERLTYLTEFFELENYGIALWMKNKKIKCDIYTRVSTTMQVDGYSLDAQKEKLKRYAEFQNMEIVNEYSDEGKSGKSVEGRPEFQRMLDNIENGTDEVQFVLVFKLSRFGRNAADVLNSLQRMQDFGVNLICVEDGIDSSKDSGKLMISVLSAVAEIERENILVQTMEGRKQKAREGKWNGGFAPYGYELVNGELQIAEDEAEIIRLIYDKFIHTNMGISAIAAWLNQHGYKKKKRQNNTLDAFAASFIKGVLDNPVYCGKLAYGRRKNEKVSGTRNEYRIVKQENYMLHDGIHEGIISETDWELAHQKREKTGVKYEKTHSLDHEHILSGILRCPLCGSGMYGNVNRKKKKDGTLYKDYFYYACKHRRLVDGHKCGYRKQWSEEKINNAVEEVIRKLVKNPKFEEAILNKIGSRIDTEEIEKEIERLEKQHRQLTGAKARLGQQMDSLDMIYQEGYVYHIKDEYFEKVQDSNLMQNKEGGTYRPTFYCLRDNKTSLLWMVPLSSRVEKFKAIHDKQVAKYGKCLTIVLGEFDGKEAAFLLQNMFPIREYYLDHIHTRNNNPVPVKHSIHREVTTRMKKIRQLHSRGKKVVFPDIDRLEQIMLAEVKDNATEMQQNIEFERCIDFLVRMIDKYGEEVLRELEEEKQNKEEKEAAVSMNRCDFSSISTCLKNHISESNQMSQPDFLYELFEDFMDDPANQDFSMDNGLVCRWMTGQAKISPKISAYYSKPSNQEKLAHTIHQNLLPLMSDCNMAIQDIYTLFIQDDSISDAKKKNLTPLYKPASSRLLFLAKLISFGMERQFIKRNTKNQKLLAGGALSPIVLDYIMDSEVPKPCRHFIGRDKELEELYTMLEENRHVFLCGIAGIGKSELAKAYAKRYIKQYTNILYVEYTGNLHQDITDMDFIDDLPESTEQERFQRHNRFLRSLKSDTLLIIDNFNVTATQDSFLSVNIQIENSIKDTPKVRNGIYLTTKSRKEGHGIGLQNVKLVVEKYHGQMEICHTEKSFQVKILLYMKLDEKMKRFRKSAIALVLALLMALQGTEPIFVQAKEAIEDVQKNADFSRPEALTEEEAGITDSTSGEQDKSQQSDADVQNETTPSEDTETQEEQTTPAEETEENPQEKEVELKEPQDYYPIPEEPEGELIDYDAISKTYKTGDKQYTTVYGGYVGTYKNEDGDTELVDNTLVKPEEADTPASEEAQEASSVVATEEKEEKTEVYQNKANDYAILLPEQMSEENGVTIENGKTRIGIIPVDGDYTHSVIKDNAILYNEVYEGADVQYTVLDSSIKEDIVLQQPTDREVYEYELQIPGYQAEVKDNQVYIYPEGKTIKDAKYLLETPSMEDAAGEISFLITLELREEDGKTILTVKPDRDWLSAEERQYPVRIDPTPVEIQKSSFNMIGVEEGSPTSQIGDNNYPYVGFDDGIKSGNLAGFGTAHQNCRTYIKVNSNFSQIPKDSKIDSATFAVSQKTAYSGGASQFGLYRVDQSWNTSITWKTKPVNLTFQDVQNASTSRNSYINYDVKDLVNDWVQGTHANNGFALVAIAEANNLGASMQCEVLNNRASVYGPKLSIQWSPAEDPYLRDMSLDETTILLRPMTEKNTNGKLKFDAVFADGIAKSKSTVEYYLLPDEENEEHHETDAKPLYSYPDSTEYNKQFPEANKYYSKDSNWQSALYSGLTKDKLYKIKAKASKEIDGKLETGKEVTSDSFVIYEVKQFDTFPKIAKYYGVPLKNIMKDNQVMDALVVANNTIFIRNPQTNVPYSPAPLTDQDKMRIDGALMGRGLHCEFGFEPVNLNTGNFYMDQSDATMNELNGEFSITRSYNSKGTDQHSMFGRGWSFNYDQSLSQMEDGSLLYMRGDGSYLIFDKNEDGSYTTPDGYVYDLKAVSYKDTDHDYIGWELTDADQSVWSFDKYGILRYVTDVNGFKTVLDYDDDYNLSKITTPSGKTFGVKQDKFGHIKELSLPDGGKVSYKYDEQGNLISVTDPNGTTKEYKYDDDSRMTSWKDENGNTVVKNTYDKEGRVVEQTDAEKGTATFKYGKSSTTTTDNEGNKTVYHYDDQYRTTSIEYPDGTTCEKTYNAENQLASETTAAGTKTYTYDTFGNVATETREDGKTASYTYNEQNKLTSATGYNGATVTYSYDGNGNMVTSTKPDGTAITYTYDDKHRMVSQTDGRGVTTTYSYDGPNMTGYVDGNGAAWGFTYDAMNRAVTMTDPLGNVTSNSYDANGNLTSKTAADGGVTAYTLDGVGNITASTDALGNTTTYTYDKMYNMTSGTDPKGNQISYVYDKNYQQVKATDAKGNTITYKYDSMGRVIEESNKDFGTKLYEYDKAGNLKKYTDGNGNATVSKFDSLGQVLQSKDAVGNITKYEYDALGNETKITYGDGSSHSKEYDNCGRLAKETDELGAVTTYTYDAADNLVSKSDDSGRTWTYTYDNTGNRLSETNPEGGTTTYTYDKAGNLVSSTDEEGRTDTYAYDKAGNLTTSKDALGYTVSMKYDLNGNLVSSTDENGNTSTMTYDGNGNMTSVSDAKGNITAMKYDSTDNLEQTVDALKGKTTYEYDSQGNSTKMTDALGNAYSYVYDKEGNNTSIILPTGDKVLMEYDAIGQLVKCTDAQGLVITYQYDGAGNLIHSSDNGGNSMDYTYDGAGNVLTQTDELGRTATYKYDQYGRLLKLTEADGSITSYEYDVMDRITAVTDAEGHKTTFTYDKVGNQLSMTEEEEATYKYAYDKKDRVISQTNPLGASSTFKYDGNDNVTESVDENGTVTKYAYDKNDNLVSQTDGNGNTTTYQYDELDRKIGETSPLKETNEYRYDAIGNLTKSKDPMGLITEYKYDSLSNMTEQISPKGAVTKYDYDKHGNVISVTDAKGXXXXXXXXXXXXXXXXXXXXXXXXXXXXXXXXXXNDNVTKMTQANGGEYTYSYDKAGRLKSMTSPLGYTKNFSYDKVDNVVKESDSLKSTTTYTYDKLHKMKSSTNALDGTTSFSYDKYGNLVKETDPLGRSNTYSYDLAGQMTSAADPLGKITAYTYDPAGNITEITKPGGRKTSYGYDKNYNVTSVTDPMGYVAKTVYDKDNRVTEETDALGQKESYTYDKDSRVTSITDKRGFTTGFDYDAHGNIQVVTDKTGLKSHLEYDKNDNLTKVTDALGGVTTYGYDNMDNLVTFTNAANKTTNYTYDLEGNLTSIKDPAGRTEKFDYDEKGRLTGHTQASGKKTTYDYDKLNDLLEKSYQDAKGETSEKDVTYAYNSAGERVSMKDQTGKSSYEYDALGRITKVTSGSKKDVSYVYDDADNLQAIVYPDGTKISYEYDLNDNLVKLTDRNRKVTTYKHDALNRVTEVIRSNGTKTEVSYDAEDHITKIVNTCGSCGKVISTYEYKYNDQGYVVGETATELEAGTRKTPSWEDWYNWGDTQNETDKADCEHQEKETQTTRTYEYDDNWELTRCTEKAEGGKKTVHNYTYDKIGNRTSYEKIEDGVSKAKYNYKYNDSNQLIKRTNAKIWGDPGTTYSYDKDGNLIQECDKTNSADPVTYEYTAENRLAVVKQGGTVLMAAMYDGDNNRVFELDNTYKWEDCYGDEVLIPENQRTEDGNSPKEQLASLVKGGSNAKGYTLTEYINDINRENTEVLAEYGADEKVRQAYTYGENGIGERVSVDKSEESSYYLYDGRNSVTGILTENANLTNSYQYDPYGNLTSGTADGVNYYGYNGESTNVKTGLQYLRARYYNAENGTFTTEDSDLGTTENPLTRNRYDYTTNNPLNYSDPTGHSLWSRIKSTAKKAAKAVKSVGKKIVNTAKKVVKTVVNTAKKAAKTIVNTVKGVAKTAKNAAKHAKQTYQSVKNRVTSSSTYQKITSRGSQFIRSVSNGVQKIGKTYTSFKSYVSERTAEIRSEVVRHMCTTTNRITDKLGKVDWNAVKKVAIGITAVTVSGLVVAATGGLAAGAVLAALPAMGGLGTAMVSGAVIGAIGGASYSAVNSGLSGNSLKQVAKDTLVGGIAGAVTGGVMGGLSYGAGKLLNVVRSAGSTHNDGIDKSFKKLVAEVTETKLPEGTWEKPPLERGDIIDKAMGNNLGHNFPTIDKVENGVVTSVKSRDLGAKTYQNGNKLEKVIVKDINKVSGFIGETFNGKFVNAEEIVGRQLQVVVPNVTLSEAQINAVNNATKHGIDKGVKLIITVGKMISVYYNQKYGFLIVPNAIERFMGCYISIEPTIEIMAEETIDKIGCAIRKGIKIAESSPKVDESQLNNFWKQTKYKSFPTFSKNYQRIDLKQNGDELEIRRWERNNRGGYSRKTEEKDYINFIEMSDYELGLFIKKMFEPCEIRIDETERFETLEGKIISYSIPNEHYKNIGDGHTDSYMTYRNEDYDKLYISFLIGDGTDCTDEVSIKNHYKKIYKQMSNIKFESKCNKKYVHFLTENGEVLLSFIDNGYVEFFMCIPYNIERKVQKESIEQYLKMLFSIKIEDKMQKKNCVLCISIGIIVCILLSACSRQPDFDAKSYVQSSLDAHYHGEYKDYANLLEISEKDAKKEIEEDFNESIQQQFDDSDNITDKGIADYAEKLTEVKKLAKYKVQDVKEEDGVYTVSVQVEPSNVFQTLQQSSTEVSNEKIKQGLDGNDPEVFAAVLTESVQKSLEKNRYGKAVTVNVSVEKDNSGKYGLLDTEMNKLEAAMFPTEMEKSAVIEEVAAFFSSTFFEHYNVPIRSPPCSDLISISKIRSEERMAYNKTSEERKWNYWKEQEEKKLRELGMEEEKIQKLRQMDREDFLEERRYREHLDETMQDMDSIKEKDSELFARDVKELLDHIGDKRIYELLKETEHQTLEILLLSTWGYSGREVAKIMGMAEQTIYTKRNRLRKKLKNLSKIEMYYTREYLNRAHREIDTIFRVLFPEHGMAVREEQIMLCHKMLDNLLGRNIALCDAGVGIGKTYAYLVACVLMRKYSLLAEGCSPYEQRPVVISTSSIALQKAILTEYIPFLSRILQENGTIQAPIKAVIRKGKEHFVCDERLEQRIVAIEEKNKNALQKEALLSLKEHYDMDEVSNLSGFDRRMVSVPKFCSGDCPKRGSCRYQQYLERSRDHEMFIQICNHNYLLADGYHRLQDYRPLLKDYRALIVDEAHKLPDAAKQMFGKSLCYDDIREICFYLGKEYQGPEIRKLSGTIRMVLDIIGENHRTRYGIKEEFHMTEECAMYLCEGIQTMNKIIEKLEKKIPKWIRNKLEETRSVLEYFFHQDKKYVLHLKQDHDHRIILCASSRRIPQYLDQMLWSRGMGAILTSGTLKTGQGFSHIRKMTGLQRVRRVREYVADSPFEYQKNCLLYLPKNLKKCRRGSQEEAEMIAGHIHSLICSTYGHTLVLFTSYHLMGNVYQMLRDEIPFPMIEVWRHSPEEITRFKQMDNAVLFAAGSCWEGVDFPGDMVSSLIIVKLPFAVPDPISEAQKKEYASLKDYIQAVIVPDMQKKLRQGFGRALRTETDTCVVSILDERAGEGGRYHEEVMCALPSCKMAKDIKDIQHFIRNRKGVEYYLMIYKVETIKDGTEKYFFIRNLETMSIEELPSKYLMHKIKCKCSGSILGVDLNEKSCQISYYDENKEEPETMEAAVDNYQIPLILGYYKDRWVYGQEAKRLKEAGEGDIVTHLFRKAVKRKKVRVGEKIHDGVWLLAKFVSLMLKKFEKIDYITFSVPYTNVDMSKMLKGIGKHIGVPGECVFVQDYKESFCQYMFYQPKELWQYESALFYCDAQEIRAYMLRRLNTVSTKSRDMFVTVEEVANAHMRELEAIYPVLNVDKAKDADESFKSFIQNVFDKKVVSSVYLTGEGFENNWYPNSLKVLCNGRRAFLGNNLYSKGACYSSMRYADPYDDGPIYLDGTKMTEQICLRMRIAGQEGWYPIVAWGTHWYEADGQWEVILEDTSDIEIHIESLDGEDLKVETVSLEGLPERTDYSLRLQIEVMFLDERTCRLRFKDVGFGEFYPASDFFVEKELHLGGINGQFNSLSMGSLILCHKKRAKRPFEISRVHMRIYTIEELCYYICNNLYLIDYTIVNERLCRWIGDELELPELSSELRRLLRENGSMEEFVLTILKESNIYATAEIHKMQSVLEQLQSQRDVEKEKYKADSLQNSKEYESAILVYQSIINRDWDESVDKKFYGRVYASMNQRKSLKELNLLDKFLFDEAMDDQENVKTMLDIIFLNTRGKHPELVSSELIELLKYMERSTDEVSGECKSKRIQEMHRRVCQIKASEKTEVKYMQAWEEMYRYNTCKEELFSFMHMITQNLYIYQYIPLSSFIRHVFICFLMAQFTNQAQLRYGNSVTNSNIAVGEILEVLSISKTAVKNTYHPGGTVTYIISIVNSGTTPITGLTLTDDLGAYAFSTTSLTPLTYLDNTVKYYTNGTLQAAPAVTAGPPLVFSGLTVPANGNLTLVYETAVNQYAPLTNESFITNTVTASGDGITSITAKETVNAEALPLLGITKSISPVPVTENGSLTYTFLIQNEGNVPANEATAVIVTDTFNPILSNLTVTFNGSTWTEGEDYTYDKTTGTFATGAGKVTVPAATFTVNETTGEWSSNPGFSTLTITGTVMQAWEEKLLERQKEKRELLRKMNHKMSIEKIADVLDMDVSEVKHIIEEQYDTEDMNKRKSLKELNLLDKFLFDEAMDDPENVKTMLDIILSQKTNLKHPPQTEKEQRTSTDNRQIRLDVYAMDEDDVIYEVEAQKENTHNLPKRSRLYQGIIDSKLLPPGGIPRTDRTFEIYGTQYRMGRSGCGKTTLLKLLGMIDRQTGGKLFFEEHDTEDLWKDEFADIRRRKIGFVFQDFYLMDSLSVRENIMLPKILDKKSAKECMEESQKYAEQFGITHLMNKKPYELSGGEKQRVAISRALINNPDLILADEPTGNLDSKSGDVVIHTLSHINRELGKTIVMVTHDPKMASYCSRLILLKDGMILEDMRNGGDQEVFYQEILGKMKELMEEKKRRMNIILGIILQIYFLFPWMNITGERKNFIMYVIAVLRNHSCADTYNTTFLDGAADALPLDIHTLAKTFTVCVMLYVVLEVIETIRLICNIKGWEIKFLSIIELIGLFAMLSVVAEIGLNSSWSSAGTIQVFPMYLLGYLAVFPIWTGIRLLMHKSMEEWEESGEQILKTQENDKHYKQERKRRLYFPGKYSKLYYHVLWENFKYHWRDFSFLFVSVLLSAAFLFIGFGMREAFSGSYGYDNELLGLGLTEIMKDCLIVIVLISLFLITVVMVFYRKKRMADDGIFRTLGMRSNAVFWSWIGELLAGFAVALVTAFVIGRAILFGIYAAVIQHFPKIDMKSEVSWKVYLITAIVIAVICLFAFGISGDIHAGERSADARNAAVKSEKIPGIYRKAGALISGLLGVIVLYLYTQRRFSESIFLLCGFFLCLYVFLYNIGAMILRKKETSMDQYLRTLPEEHMIRHRYQTTVKYLTLMIVIHVCVMSFFSVKVVSNRIADKTDTLYPYDYVWLANSNDTGIIEKLKQECKAEVTSIPMVRATTIDNTERLEGPFDLVWQQGQNIGISESSYRKLKNAVGEKPKKYLNLDKNGKKIYVVYQQDQGTKAKPIDHYQLMIHPNLHIGQPLFGFDTMEHQTYYPVRTITGSETSSLIGAFKQGKYENLIVFADAYFDKIKDYWKMTDMNTGEKIKTSDAVLEENIHEWPTKLVLANVPEKYQKKADQLTIDFAKQHAYDESFDSLVKSTYTKTEAAKKRQMERILECVMNGFVLIILSVISMLLLHMKVQMELPDMRKRYQFMNRLGMNRRERICIEKKEISRFVTIPSVIAVIVTVLYSGIVFGLRDYHLNDVKNYVINAGVLWIIYFILQWLNLKWLEDTIVKKIEKGADLMKEWMRKRKADVCMGILLQIYFFFPWIRIDGGYHTIHVYLIEIFRKESCIKAYNYIFLSGHPILWKYSGFAAVTFTMIIAFMIVMQMIELWQLYRHMKGIKTFDIHRYVWVLAIVLFFLYLDASYIYLDDSALFKLRIYMYMVIFIGIIGIWMFLDIEAAAWDTEIAKHKTELKERDEQLLQVKVKVLEEKYQEMLKSRKVVHDMKNHLLALKKYDQERDWEGLHQYLNELSDDMLDDSYQIWTGNRMLDMILNQKTKDAKEKETDMQIETEVFATLPFSDREIISLFGNVLDNALEACERIQDKKRWIKIKIKKKNHLLYIETSNAIKEMPVQNQKEFVSVKEDEILHGYGMKNIQDIVRKYDGIFRYKIYGEYLVCIISIYDIRGAEEEMFQIAMIEDEEHTRQEVERLISREFEKLKVQDITTEIYKTAEEFLEVKKHYDVVISDIDLPGKSGIDLGRILKAEQKDICLVFLTSYAEFAVDSYVLEAYQYILKRDMKERLPAVLQKIYQEKQKESQNFFWIGGVTDQRKLYHKDIICIRKVKGQKYVEFVMVNGAYKERLALHQIFEDLKSPAFIFAGRSHIINIDHVDRITTDAVYLEDGIKIQAGAETIQDVKTRIMEYWRNVEMEEKNYSKVPVFENGLAQPVFKFTDGKTGEKYDPATSSIVRYCVYVESDYDMDGDGKRDLVKAFIQVPRSAVEGNYKAATLYEARPYCAGVQADGYDHMKEVESKEYRKIDFADLDKEVPARIPEGMISAMDLALKADPADWYYPDKGNNNSMVYENLDNFNYYLVRGFAVVVSAGFGALGSDGFNYVGSEYERDAFKSVVEWLHGDRVAYADREGKIETKADWANGNVAMTGRSYAGTMPFAVATTGVEGLKTIVPVAGIADWYTQQNMQGAQRYWPKEMLNSFLAYFCSSRYNDETLSEKQLDDIAAFHHELSLQQLKCGFDYDPEFWGAGNYRLHADQIKCSALIVHGFNDENVSTKQFEMMYTAFEQAGQTVKLILHQGPHITPTMANKNYGILIDGKFYDDIVNEWISHYLYGVENGAEKMPEVLAQTNYDQKKWETESAWETEYTMKLTSKEESKTVIDTDWEKAGVSAENFDDVMALKSTNMAQRYVTDPFEKAVTVQGTVCLNLKAALKDGNIETDFDPENRNDVDTLTMQLGNSKVSGKMDDVEIAVLLCDVCDEEFDSIQTVDPERNIVPVTTVKEGGIINGGDLPAFDEAEFNTVHKKYRVITRAFADLCNPEAGYAPETAQNSIELKKGEYHDYSVYLNTTRYTVEPGHRLAVVVATEDPVNCLIHKTYSVEIDDNSVMVEVPVTKASEDMGLNKAEMKSISIYTITRNQNIEQLQKLERQLSGRDYFLKMREWELESMKALTAELETCMEDVYALRFFYSFQIPRLGKEFDLLQIKEDQIVNIELKSGVVSDEAICRQLLQNRYYLSVLGRTIHSYTYISSQNRLVRLTNHDHIAEADWDELCRALKRESPDYDGNIEELFRAELYLISPLREPERFLQKEYFLTAQQRDIERQILKGIRAKHSDYYWFSGLPGTGKTLLLYDLAMKLSVRQRVCMIHCGESGEDWRILHKRLRRIDFLSDRQLSLQTAKQTMTENVCAEEAFDTFLKPYSAILVDEAHLLSVEQLKILEECKKQIPIIFSSDTEDMISPEELDREISQRLASLPDVQSFHMTNRIRTNAELSSFIQNMLDLSRRKGQKGYPNIEVVYANDDTEAVCLMQGYARRGYLYQNPAMRDVNRLVAVLDEQYYYDEDGYLRAGKISEASYEITPITTSEGRKSNVRLLFHQLNQAKEKLAIVIKDNPSVYDTILDILMNKTTIITNVQTRLFELQDLKYRDFHAKLMPTVNKEKIIGVRTPALRVFAKKYGKTDEAKEYLQILPHQYYEENNLHGLLIEQIKDYDTCLEELERFLPYIDNWATCDMLAVKVVKKHLDTFIDEVYRWMESDHAYTIRFGISMLMRYYLEDAFQMEYPEKVAQIRSEEYYVNMMRAWYFATALAKQYDKILPFIEKQKLDVWTHNKTIQKAIESYRITPEQKEYLRGLKIKKMVEPLELGRFISTCRKEKNLTQKQLGEELGVTDRAVSKWENGKSFPDISLIEPLCQILDISVSEFMLGKRIEPEHYQEETEKAWIASLDEPLLYKIQMIIYILGIAAVAVLQVPLFSHGPMCVNIICWAVWGALFFAAYYLDKKIPERKLRYSNPWIEGVFSVIYFLCYMLWFFLRKDEWGTLPMSEQMSLWAIIVVGLIVGVCVRVFLARKKRRSAVMTQKKKYYFCFALAISICMTVLIQVFQLYSLPILGILELFMLVNVCMIAVNIFNRKCLNHVGTLIITGSLFLFLLARNTFLFLFSFSIMEYLTGVKPKETKEISELLEQVEAGAKVKVNGAVHTIRDMGTVAFVILRKREGLLQCVYEEGSADFELKDIKEAATVEVEGVLEENEKAPNGIEIRMESVKILSEPEDEMMPLAISKWKLNTSLEAKLNYRSISLRNIRERAKFRIQEGLTRAFRDFLYSQEFTEIHTPKIGAKGAEGGANIFKLEYFHKSAVLAQSPQFYKQMMVGVFDRVFETAPVFRAEKHNTKRHLNEYTSLDFEMGYIDGFEDIMAMETGFLQYAMELLKKEYDRELKVLGVELPDVSHIPAVKFADIKEIVAEKYNHKMRNPFDLEPEEEVLIGRYAKEEWGSDFVFVTHYPSKKRPFYAMDDPEDPRYTLSFDLLFRGLEITTGGQRIHDYKMLTDKIAARGMTEEGMEQYLATFKHGMPPHGGLGIGLERLTMQLLGEDNVRETTLFPRDLSRLEPMFGKRCSLCGGKLNSRGICTECGLDNSKSDKNYRINRSDCDGMPLTHVHEEKEKHRPDRKADHREINHKETNHKKRDYGKQGYRMNESDMTGKKRRKHVQTPDITNRRRPLKIVILAIIVIAVLGNLYEEHKYDIEYAVGDAVQGVFQDTGDQKTNDTDETDYDHYQYVTREIPKEGESADYELTSGNYVAGVEIPEGIYTVTPQDDYDTVQIDDPENSIYLYEYTEGKKDKIKDIRLYKGAHLTLNCRTTVKLHTDNAQDVEAMETAGQSNPLTESVDIKGQKTLTAGRDLEPGIYDLSRVSGAGNVDVIIYSDEQEEINSWSQCLSEDGIDGETFHYLVIPENATMEVSEDLKIRLTPSEQIASTDYYGFYNRMANKISDETIEYVGILAKLELSGQEKEDAKADMEKMLDYIDTLNELDTDGIEPMSHVFPVKNVFREDVVTNGDGSAETLANAPLEKDQSFKVPKTIGMDITSLTAVELGKKIKAKEISVVEAVKASIAQIEKVEKDVNSFVTLDKEGALKRAEEVQKLIDDGTLTGPLAGVPVAIKDNMCTKGMLTTCSSKILGNFQPMFTAEAVKNLEAAGAVILGKTNMDEFAMGSTTETSYFGPTKNPWNLEHVPGGSSGGSCAAVAAEEAPYALGSDTGGSIRQPSSFCGVVGIKPTYGTVSRYGLIAYGSSLDQIGPVAKDVTDCATILETIASYDPKDSTSIKRESYDFTSALVDDVKGMRIGIPKDYFGDGLDAEVKENILQAVKVLEEKGAVVEEFDLSLVKYAIPAYYVIASAEASSNLARFDGVKYGYRTEEYEGLHNMYKKSRSEGFGPEVKRRIMLGSFVLSSGYYDAYYLKALKTKALIKKAFDKAFEKYDVIVAPAAPTTAPELGKSLSDPIKMYLGDIYTISVNLAGLPGITIPVGKDSKGLPVGMQLIGNCFEENKIIQTAYTFEQTKAYEAPELAKEDRMAKQYETVIGLEVHVELATKTKIFCGCSTAFGGAPNTHTCPVCTGMPGSLPVLNKQVVEYAMGIGLATHCDITRVCKFDRKNYFYPDNPQNYQISQLYQPIARNGYVEITVGDTKKKVRIHEMHMEEDAGKLVHDEWDDTSLVDFNRSGVPLVEIVSEPDMRSSEEVIAYLEKLRTIIQYLGASDCKLQEGSMRADVNLSVREVGTQEFGTRTEMKNLNSFKAIARAIEGERERQIELIEEGKAVIQETRRWDDNKESSHAMRSKEDAQDYRYFPEPDLVPIVIDDEWIEKIKAKQPEFRDEKLERYKKEFDIPQYDAEILTESKHMADIFEETTAICGKPKKVSNWLMVETMRLLKEHGMEPEDISFSPANLAKLIGLTEAGTINSSVAKEVFEQVFEKDVDPESYVEEHGLKTVNDEGALEEVLKEVIAKNPKAIADYKGGKEKALGALVGQTMKAMKGKANPGMVNQKLREMLKMSMYVRYTQPKGLKAQFEIIHYGEGQIHMKCPICGQELRPGKKDPNYLLCYNCKKKFKIPQSAHKVQKRAEKPEPEEQKYSNIPPKEVREKREQEMRDAYDELLAVGDGRKKKKPTPKPQRREELEDDFYDDIEEEEEKMSKAPIIILAIAIIVVAGLIAFMLLRMENQYNYYTSDQNMNTENYSTGGNQDQGPKKKHGKGASRWAKVVCTGLVFGVVASAAFQASNIVAGKVLGTTQTTNKTAKTTTTANSAKLTTSSNSSSGTANVTEVAKNAMPSIVSITNMSVQEVQNFFGGTQKQKSESAGSGIIVGQNDSELLIVTNNHVVEGSSTLTVTFIDEESVEADIKGTDSDKDLAVVAVPLSKIKDSTMNKIAVATLGDSDKTQVGDQVIAIGNALGYGQSVTTGIVSAKERTMDSYDGKLLQTDAAINPGNSGGALLNANGEVIGINSAKIATETVEGIGYAIPVSDVSDLITNLMNQKTKTKVAESERGYIGIKGVDVTSDSAQMYNMPTGVYVSEVISGGGAEKAGITKGAVITGIEGTTVDGMDALQEQLQYYKAGEKVKITVQTQSKNGEYEKKDVEVTLGKQSEMKRSRKRKKNKTLSRSKKGLIILIIITVLLCVVTILKKQEQSKEYTENKSDYIDSVKPNIDVELLTPNEYSRPGIATNKIIGIVVHYTANPGATAMNNRDYFEGLKDSHITKASSNFVVGLEGEIVQCVPTWEIAYASNSRNIDTVSIECCHPDETGIFNKKTYQSMVDLCAWLCLKFDLDENDVIRHYDVTGKICPKYFVENEDAWRKFKSDIGTKLKKLEEYQMKKEFGATKNGEKASCYVLKNSKGMEAVVSDFGASLLKLYVPDKDGKTQDVVLGYETLEDYENGGDSLGATVGRVANRIGMAEFELNGKKYELTKNDNGKNTLHGGIDFYNKRMWDVKEEDDTHVVFALVSPDGDQGFPGEVKIEVSYTITEENELKIHYHAIPDQDTLLNMTNHSYFNLSGHASGTAWNAKVWIDADAFTETDAELIPTGTVVPVEGTPMDFRKEKVVEKEVGADYTPLKLAGGYDHNWVLNGKGFRKAASAESEETGIKMEVYTDLPGIQFYSGNFLAGSKGKEGAVYEKGYGICFETQYFPDAIHKENFESPITKAGEVYDTTTVYKFCMGKIIGEGITFDDVLLVPSYSEVIPNQVDLSTYLTKKIKLNIPMMSAGMDTVTEHRMAIAMARQGGIGIIHKNMSIEQQAEEVDKVKRSENGVITDPFYLSPDNTLEDANNLMAKFRISGVPITEGKKLVGIITNRDLKFEEDFSKKIRESMTSEGLITAPEGITLEDAKKILAKARKEKLPIVDKDFNLKGLITIKDIEKQIKYPLSAKDAQGRLLCGAAIGITANCLERAQALVDAKVDVVVLDSAHGHSANVLHTVDMIKSKFPDLQVIAGNVATGAATEDLIKAGVDAVKVGIGPGSICTTRIIAGIGVPQITAVMDCYEAADKYGIPIIADGGIKYSGDMTKAIAAGANVCMMGSIFAGCDESPGTFELFQGRKYKVYRGMGSIAAMENGSKDRYFQTDAKKLVPEGVEGRVAYKGSVEDTVFQLMGGLRSGMGYCGAATIEDLKQTGKFVKISSASLKESHPHDIHITKEAPNYSVDEMDDFYTEQLIKKQADSKDTLKKVGLIALTVVSVLLVFVIPVGIILPVVMIVIDVLMFRNLNVEYEYVFVNGDLDIDKIMNKARRKRMFSVDADQMELLAPVGAVELMQYKKIKTYDYTSGKKDAKIYALIASNKGEVCKVLFEPNETIVEGFFVKAPRKVIRKKVSNDGVITIEESKTMKTELDLVEGMQFDRGYVSAYMATDMDKMEANLDDPYILITDKKISNIQEILPLLEQIVQAGARLLIIAEDIEGEALTTLIVNKLRGTFNVVAVKAPGYGDRRKEMLKDIATLTGGQVISEELGMELKDTTMDQLGRAKSVKVQKENTVIVDGMGDKNAIADRVAQIKAQIEETTSDFDREKLQERLAKLAGGVAVIRVGAATETEMKEAKLRMEDALNATRAAVEEGIISGGGSAYIHASKAVAKAIEELEGDEKTGAKVVLKALEAPLFHISANAGLEGAVIINKVRESEVGTGFDALTEQYVDMVENGILDPAKVTRSALQNATSVASTLLTTESVVADIKEDAPAVPAGNPGMGMMMIYFSFRFLLCNAIICIFLGSLLGLKNLLQRQLSACMQYNLSIIFLAVLIVPFLPINSAPSSISWRHLLTASSSTNGDIQTTFLSGNGYNLDKINDFAVSVSTQIPTFIHTLLVFFWSIGIFIMFFLLYRSVKQVKALHSSALPLQNEELNALYIECLNEVNSKHTIPIYSTAFLKSPVLAGFLHPRIYLPIHLISDFNAGTISATDIRYMLLHELQHYKHKDILIGYLINTVNVFYWFNPLIWYFLKRIRQERELACDSAVLQLLKETEYKSYGNTLINFAETIALSPFPLTMGISGNIKQLKGRILNIASFHQPTFKQKIRGYLICIFVSTIIIGCIPILSAYASDQTGYHFDTTEKNITQLNLSSNFGDYTGSFVLYDQSADKWNIYNMEHASTRVSPNSTYKIMSNLPQISEAEFEVMKIVWKYAPISTNEITEKLTQISSWSPKTIQTLIKRLVSKKALTYEKQSRVFVYTPLVKEDEYIRQESNSFLKRYYNDNITSMLASYIEDDKLSEEDIASLRNLLSNHMGRVVVVTFDENEEEKLNELLHFLSAKKYSEMPDKQNRVLDYGALKINAEYRSVESNGELVQLTNYEFEILYLLAKNPGRIFSKEQIYTQVWKEPYYGAEDNVMGIIRRIRKKIEPDSAKPRYILNVWGMGYKFNGELMKMENDIWNEISSFLNQLRCENINRESYIYFQELANIQLKKKMEKEKVNKLLDHISYEDREKLKQYGEILEEEAFVSEQRAYCQGYVDCXXXXXXXXXXXXXXXXXXXXXXXXXXXXXXXXXXXXXXXXXXXXXXXXXXXMDIPKTLFATLVKQGRMEMHLTQEALAEKLGISAAYLGDLERHKGGPSLELFCKTMQTLNISADDYVYPNQNKNNSTYDQILRLLNQCNDYQLQVILATTTALLDSNPFISNVDTTNDTKMNEKAYKSLSVKKTDSERAVFVCLFSFPESNRRKYGSMEGRQPKRRKDKYNPYEIYEKDGKYYVSFRNGEKEYKDLEIGKNVYEAFNTFELQDVSHMNVVDRHLEQSEIWDSSLYERIFQKEENVENTVLNKLEAERLHSAIQQLSEIQRRRLMKYYFEDKKYEQIAQEEGCSFQMVAKSVKAAIRNLKKILRMEDRNVKRGDIYHADLDPIFGSEQGGYRPVLVIQNNIGNKYSPTVIVAAITSKEKMKLPTHIAVPEMEGLEKDSVVLLEQLRTLDKRRLENYVCTLDRTEMEKINKAIRRSTGIPKIIEKPLVVSLCRVCAGNFYDVPGHYIRRVNPEQRYKDTCMFCNVRNGYDYYIGRKNKMAMIENEVEKKVYKVEDVQNLLGLGRSKAYEFIENVYYDRKPFRVLKIGRSYRIPCNSFDRWLNGDEERERVRAEMKQKETQQETMSKEKRVVFFEGKSWYHRTKELQDDLTTKYGKKGGFETPEEAEKSYWEYEKRYQKKQRNLQIAKMQKTDVMLGDYLEYWFENIFSPRIETTTRMVGAYTLYNLILPSMEADIKLKYISVEYLDALLERVAKICPSAGNKGRELLSIAMKDAAGDKFISYNPMPETKPYSRAKPKVRVLGKEKLKVFLEAASKNPWYLEILLGLFCGLRKGEILGLKFQDFDFEKQTVRISRQLVGNLKLKEKEFTVTEYAVIERNPKTENSYRILRVPKVVMQEVKRRQQLIELRKTDPGIEYKNFDYVCCQENGEPRSLTAMNQALTKICNRNGLANITVHGLRHMFATILIELGVPLFKISGLLGHSSVHTTYEYYCEIMDEQDKIIAFVNNTFVPQQTGTEGMHKTFDFKKYVEYKVYSVTTIKKGYGFRVLLTFADESTKTQQHAGFTTKREANAFRDEVIGQLHTGTYIVYGKIRVEEFMIFWLEDIMRPRITDDTYTTYKSAIRNYIVPQLGKMYMSTLNQGYIRKLYNTVAEKYESVAKNVRTIMKTSLEYAFNKNVLATNPAKGINLPKKIKKTEYRVLKIDEKKTLTLPQVLQLIEASKETPIHMQILFAVLMGLRRSEINGLKYSDVDYIHRTLRVERQLEKKPNSKAEDCAPKMLTKQEIKTKTLAGVRELPIPDYVFEAILEERKTYEKNRRRRPKEFRDWNYICCSTYGNPRSKGFHQKYYKDLLKSLDLPDIHFHQMKNGKLKPSNGESYTASDFKNYDFSKEQVAVTYENGTAVPVPELITDTKGYVVSPELPYGSYVVVESTTPENLKTIDPFVVNVENDSREPMQWRVFDDRPFEFLLKIVKKDAQTGNTVLKAGASYKIYDVTNKKYVEQVVQYPKKEKISVFETNEEGYLITPQELKCSTYRIEEVKAPEGFVRQGSEESLYDGTTIISPLEQTTKGTYKENPQSGIVITVSSNIAHQIDPDTGAAIVEVEQKNDEQVGSLLLTKKGEQLTEVTGDSVLAKVKALVSKVRNAVSGKEETCIYKGFKYEETGVEGAEFEVYAKDTIYSPDGFKAQGDSTLRGAVYGLYAKEDIVHPDGTTGVLYKQDSLIAQGVIGDDGTLEFSELYLGEMYVKEITPPEGYTLDTTKYEVSVTYEGQDVAEVTRDLTVKEQVKKQAFQLIKVSEDGEQTETDLVAGAGFKVYLISDLTQVKNGKLKPANGESYTANDFKNYDFSKEQVAVTYENGTAVPVPELITDTKGYAVSPELPYGSYVVVESTTPENLKTIDPFVVNVENDSREPMQWRVFDDRPFEFLLKIVKKDAQTGNTVLKAGASYKIYDVTNKKYVEQVVQYPKKEKISVFXXXXQTWLQEQDLRYIMVKVSGLSQEKIKTQASMQKQQVEKSLQAMQKARVVQMARKSAQASAESGKSVFQVTGKGSKLSVQGITAAIQKGGVALEKMGKWIAAGGGAFLLIVGIIAGAAFSSSSESSESLSEEVLAYTSVIQQYASQYGIPEYVSAIQAIMMQESGGRGTDPMQCSESPYNTRFSHSPGSITDPNYSIEVGVQTFADCISQAGCSSPQDMDKLKLAWQGYNYGMKVKNLKTRIAAFGLAVLMGVSTLSSANAFAAEQTDVGQEVQASEQAVTSQKEQAVTADDITKEISDETFAVETSMEGLHYDAEKEDVTLISIQDENGGEYHPDKAGTYIASYMVVPKEQSDSYTISRKVILTDTEGQAHAQDNGGEKQKSDTKSEDDSDSPVQNYTDVEIEASGEEASAQAIEELKEDIEEGNVMVLSAAERATSSGSTVTLTKGRTIYYPMRKIEERYYFAYGSNMNLGQMRFRCPDAEVVGNVRLEDYRLAFRGRAPGNGVATVLPEKGSCVDGVLWRITEACEKKLDFYEGFPNFYGKETIQVKDQAGALREVFVYTMNSPHKDVPARPSKFYLDGILEGCLENDLPTKAVMDAVKRTRQEMKKAEKQYTRMSDGSIYTQRKVYGRTVDAGREYSTEMVSPKLSYDEMGKLQEVVRCLRRHGGFVNESCGQHVHVDAANHTPQSLKNALTIMYAKEDILFKALKVQERREYSYCQKVRPEVLEKIRKMPNKSITMDRVRNVWYGGRDGSHNHYDSTRYYALNLHAVFSKGTLEWRCFESTLHAGKVRANITLALAISAQAINQRSTQMKKTPISENPAFTFRTFLLRLGLIGEEYKNVRKHLLANLEGDLAWRYDKSTYECLKKKQRTDDVRSRSSSESSESLSDEVLAYTSVIQQYASQYGIPEYVSAIQAIMMQESGGRGTDPMQCSESPYNTKFSHSPGSITDSNYSIEVGVQTFADCISQAGCSSPQDMDKLKLAWQGYNYGDHLGYSKYDYKNKETDDSRNGYSPKTVTSSMGTIDLDIPRDRKGDFEPQIVKKNQTDISNIEDQVLSMYAKGMTTRDISAHLKDVYGVDASAEMISHMTDRILPIAKEWQNRPLERKYAIVFMDAVHFHVREDNRTVKKAVYVAIGVKLNGKREVLGMWVGGNESAKYWLSVLNEIKNRGVEDIMIVSVDGLTGFGDAIHAVFPQAEIQRCIVHQIRYSTKFISYKDLRPFMADLKLVYKADTEDLALTALDDLEEKWGKKYPASIGSWRNNWTQLSTYFKYPSEIRKLIYTTNSIENFNRQLRKVTKSKTIFPTDDALFKMLYLAMMDVTKKWTGKAWDWGLTLDQLCIYFGDRIQPMDIDMDEENKQVTADEVYSYGESTEEPAGEPEEKAEPEPEATGSEDSQDNKFVYQDNQYDYSQQYSRNRNEQSDNSPMDLKDWILTLIVLLIPCVGIVMYFVWAFESNGNINRRNFCRAQLIIFAVLLGIYLVLFMLFGVVAFSQVVGYMKDGFVLLKNDIKKAKWAVIFIIAYFVFGSQFLPGICPFVWITGFPCPACGLTRAGIRLLHLDFKGAWKMHPFIYAFAAGVVIFAWKRYICKKPIGKWFKTGCVVCVVLMVIYYVWRMYRYFPDQPPMSYYHYNLLRLFKDVAFGALKMSVTGIILAAVIVGGTGLFIGVFLGVAGKKFAVEVDEREEAILGVLPGNNCGGCGYAGCSGLAAAIVKGEAEVGGCPVGGAPVAAKVGEIMGVAAGAQVHEVAFVKCGGDCEKAKQEYEYHGLSDCTMVNMMQDGGPKACSYGCLGDGSCVQACPFDAIHIVNGVAVVDKEACKACGKCVAVCPKHLIEIVPYDQKHLVKCNSQDKGKAVMQACTAGCIGCKMCEKACKFEAVTVENNIAHIDYEKCKDCGACAVKCPKKVISMKELLIIAIGSAIVNNVVLSQFLGICPFLGVSKKVETATGMGGAVVFVITLSSFFTGLIYKFILVPLGFEYLQTIVFILFIAALVQFVEMFLKKSMPSLYKALGVYLPLITTNCAVLGVALTNVQKEYSIIEGVVNGIGTSVGFLIAIVIMAGIREKMEYNDISESFQGTPIVLITACLMAIAFCGFSGLIMNKCTERVYNGLIKENPTFVLMLGMCPTLAVTTSAINGLGMGLSTTVVLVLSNMLISMLRKVIPDSVRMPAFIVVVASFVTIVQFLLEGFVPSLYDSLGLYIPLIVVNCIILGRAESYASKNPVLPSIFDGIGMGLGFTFGLTCIAIVREFIGTGAIFGVQILPLADAAAGKGGYVPVTIFILPAGAFLVLAFLVAGMNKLKKRAAQKGKKIAEPQGCGTDCASCGGCGSKVFPTGNEEMGTNATVDEVCTAGDEGYVITTTDKDGFGGNIQITVGIKKDGTINGVSILSISETAGLGMKATEPSFYNQYVNKKADKFVVSKDGGDGEQIDALSGATITSRAVTGAVNTALGYYQNAFKMSENNLKMSSSPHIRSKATTSNIMMLVAIALLPASAFGVWNFGLPAFGMLVTTTVVAVLTEYIYEKLMHKKITINDWSAAVTGLLLGLNMPPTAPWWMGAIGSVFAILIVKQLFGGLGQNFMNPALGARCFLLLSFTSQMTSFVYDGVTGATPLAQLKAGNAVNTMDMLIGKIPGTIGETSVIAIVIGAIFLILMGVIDIRIPGTYIVTFVIFIGIFGHIANPDVGFFDPQYITAHLCGGGLMLGAWFMATDYVTSPITPKGQYVYGIILGVLTGLFRLFGGSAEGVSYAIIISNLLVPLIERVTLPKPFGKGGEKMALLTFKGGIHPDDGKSLAKDKAIVDVKPKGNLVYPVSQHIGAPANPVVAVGDHVLKGQMIAEAGGFVSAPIYASVSGTVKAIAPHLNPTGGRVNSIVIENDGEYKEVEYPAVTPLEDMSKEDILNAIGTAGVVGMGGAGFPTRVKLSPKEPEKIDYIIANCAECEPYITADYRTMIETPEKLVGGMKIILRLFDNAKGIFGVEDNKPDCIEKLRELTKDEPRMEVLALKTKYPQGGERQLIYATTGRAINSAMLPADAGCVVDNVATMVSVYQAVVEGKPSMERVVTVSGDAVAEPGNFRVPFGINQQELVEAAGGFKTEPEKLISGGPMMGFSMFSLDVPVTKTSSSILGFTKDEVAKMEPSACINCGRCVEACPSRLIPSRLADYAEHHDEEKFTKHEGLECMECGSCSFVCPAKRPLKQAIGSMRKIALANRRKKKMSELTFEQMLEESFKTIRNGEVVDGTVIDVKPDEIILNIGYKADGIITRNEYTNEANVDLTTVVSVGDKMSAKVLKVNDGEGQVLLTYKRLAAEKGNERLKEAFENHEVLKAPVTQILGGGLSVVVDEARVFIPASLVSDTYEKDLSKYQGQEIEFVISEFNPRRNRVIGDRRQLLVAERAEKQKELFAKINVGDRMEGTVKNVTDFGAFIDLGGVDGLLHISEMSWGRVENPKKVFQVGDKVEVMIKDIHDTKIALSLKFPETNPWANAAEDYAVGTVITGKVARMTDFGAFVELAPGVDALLHVSQISRAHVDKPSDVLSVGQEITAKIVDLNEAEKKISLSMKALEQPEEAAEETDAEMNVELAKTAGFCFGVKRAVDTVYKQIEKHQSEKIFTYGPIIHNEEVIKDLRSHGVEVLNDEEELKTVDADVVVIRSHGVAKYIYDIMDERGITCVDATCPFVKKIHKIVAEESAKGSYIVIIGNGEHPEVEGIRGWAGEQVTVIQTPEDAERFELPEKEQKVCIVAQTTFNYNKFKELVEIISKKRYDIVVLNTICNATKERQTEARQIAARVDAMVVIGDKRSSNTQKLFEICKEECLNTYYIQTLDDLDINQLRSVESVGITAGASTPNKIIEEVQNNVRINFMGYNVAIDGPAGAGKSTIAKLVAKEKGYIYVDTGAMYRGLAIHFLNKGIEPGETDKVIEACKDAEVTIAYEDGVQHVYLNGNDISSRLRNEEVGNMASVTSAIPEVRKKLLELQQNLAKTQDVIMDGRDIGTCVLPGADVKIYLTASVETRAKRRYDELKGKGEDCNLEEIAHDIEERDHRDMTREIAPLKQAEDAVLVDSSHMTIEEVVKAIVDLCKMSKVVVIGGGAAGMFASIAAAGCGHQVVVYEKNEKLGKKLYITGKGRCNITNACDMEGLFDAVRTNAKFLYSSFYGYTNQQVIDFFERIGVPTKIERGDRVFPVSDHSSDVIRGLEREMDRLGVKVHLRTAVKKVVAKDGHFEKIILGDQRQIHADACIVATGGLSYQSTGSTGDGFRFAESLGHTVTDCMPALVPMECKEEWVPELQGLSLRNVNVTILDGKKKLYDDFGEMLFTHYGVSGPLILSASSYVGKKLKAKELTLKIDLKPALSEEQLDHRVLREFEENQNRQFKNAVHKLFPSKLIPVMIELSGIDPEKKVNVITKEERLGFVRLIKGLTCTLTDLRDYNEAIITKGGIKIKEVDPGTMESKLVKGLHFAGEVLDLDAVTGGFNLQIAWSTAYAAGTGIQIMSAKNELLKMIDERYHKFSKGQKKLADFIREDYDKAAFLTAAKMGGEVGVSESTVVRFATALGYDGYPEFQKALGELVRMKLNSIQRMEVTYGRISQGEILTSVLHSDIEKIKLTMEAIDHEAFEMAVDTILKAKRIYVIGIRSCSPLASFLSFYLNLICENVTAVNTNSSSEIFEQLIRVSEDDVVIGISFPRYSMRTLKALEFASNRKATVITLTDSVHSPMTLYSSCNLIARSDMASIVDSLVAPLSVINALVVALCMKKQKEVITTLETLEQIWDEYQVYSKDELNMVDDRVELSGNEKEMADIVKKPVEITETILRDAHQSLIATRMTTEQMLPIVDKMDKVGYHSVECWGGATFDASLRFLKEDPWERLRKFRDGFKNTKLQMLFRGQNILGYRPYADDVVEYFVQKSAANGIDIIRIFDCLNDLRNLKTAVKAANKEKVEAQIALSYTLGDAYTLDYWVDIAKKIEEMGANSICIKDMAGLLTPYKATELIGAMKEAVDLPIQLHTHYTSGVASMTYMKAVEAGVDVIDTAISPFALGTSQPATEVMVETFKGTPYDTGLDQKLLAEIADYFRPIRDEALDSGLLNPKNLGVNIKTLLYQVPGGMLSNLTSQLKEQGAEDKFYDVLEEVPRVRKDLGEPPLVTPSSQIVGTQAVFNVLMGERYKVATKETKDLLSGKYGQTVKPMNPDVIKKVLGDDPEIITCRPADLIPDELDTLRKECEQWIQQDEDVLSYALFPQVAVEFFKYREAQQTKVDATVADTENGSYPVMEYITTTLGNLVHQTAFFSLTWGNVVMIAVACVFLYLAIRHGFEPLLLVPIAFGMLLVNIYPDIMLHAEDAANGTGGLLYYFYKLDEWSILPSLIFMGVGAMTDFGPLIANPKSFLLGASAQFGIFAAYLGAMAMGFSDKAAAAISIIGGADGPTSIFLAGKLQQTALLGPIAVAAYSYMSLVPIIQPPIMKLLTTEKERKIKMEQLRPVSRLEKILFPIIVTIVVCVILPTTAPLVGMLMLGNLFRESGVVRQLTETASNAMMYIVVILLGTSVGATTSAEAFLNMDTIKIVVLGLIAFAFGTAAGVLFGKLMCVATHGKVNPLIGSAGVSAVPMAARVSQKVGAEADPTNFLLMHAMGPNVAGVIGTAVAAGTFMAIFGVGIMKNYTITVNGNVYDVTVEENGAGAAPVARPAAAPKAAPAATPAPKAAPAGGAGSIEVKAGAAGKVFKIEANVGQAVKKGDAVVIIEAMKMEIPVVAPEDGTVASIDVAVGDAIDSGAVLATLNMKKKLSVLLCVLVAMLCFTACGSKKENLQYDKSTITQATDFLIEYCNSADADTIEQWNKMTDFQIESQLNQAGVPFTKDSFLAALDAWQQGTKECGEYVSHGDYKFEPSSDELKVTTSAKFKDRDADITFVFDEDLYLDSTTIDAHYSIGEIMEKAGLNTILGMGTVFVILIFISILISLFKYIPALEEKFKNKGKAESTQEAAPAPAAVAAPVVEEASNDDELAAVISAAIAAYEAEAGGSTDGFVVRSIKRRPSNKWHAMGNMAADNAAGKRINSLLDAGSFVEIGGAVTARTTDFNMQEKETPADGVITGYGVIDGNLVYVYSQDATVLNGAIGEMHAKKISNIYDMAMKMGAPVIGLVDCAGFRLQEATDALEAFGKLYQKQSMASGVIPQITAIFGTCGGGLSIVPALTDFTFMETKNGKLFTNTPNAIPGNDISKCDTSSAKFQSETTGLVDGIGSEEEILADIRSLVCMLPSNNEEDSSYEECNDDLNRVCADLANAKEDTAIALTMISDDNIFCEVKKAYAKDMVAGFIKLNGMTVGAVANRSKVYNEEAEVEAEFDGSLSADGAEKAAEFVQFCDAFNIPVLTLTNVSGFTASEYDEKRIAKSAAKLTYAFADATVPKVNVVIGKAFGSAYVTMNSKAVGADMVYAWPEAEIGMMDANQAAKIMYADADAATIREKAAEYKNLQSSPLSAAKRGYVDTIIEAADTRKYVIGAFEMLFTKREDRPVKKHGTVMANYYRVAYKESKNTLKQICELFRVDSSDITIKFIVTVMGPLVFYFMCKYGNPGGGTPGGMTFFVIKYIVVWALAFVAAVILNRTIWRKVLSTTAVGDAEEQFDRRCRLNGGPVSSEIHFFDDHFDSVTAKKTRSFSYKDVTKILETKEAFGVVVKADPETVGSARAMIGFPKTALEGNNTDELAEFLLERCRNMKRKKVKKFMENTKKKFPFGFYVCCLTFSFERLAYYAAKWGLAIFIAAKAVNGGLGLDQSVGAAMSSNLVAFTYITPIIGGYIADRWISPRILVPIGEIMMGLGYLCAWKANGVGMLWAMIILVSIGTGFFKGNVSGINGRLFPLADQDELDTVFNLQYMFVNIGSFCGTTFLSLVGKSAGYRTMFLVCAIFLFIDCVWWFVGMKSFGEAGKKPFLVDNRTENVDKADKEKDNAPLTKLEKNRVIAICIVTLFSGIFWLIWYMAYMPVYYEFGPVSEAGRGWANWNIGSFEMPTAWFDSMNGLLCIILCPVFAGIWAKMRQRPQGDWGMFTKTAIGIIILGLCTASMVLAAVLCGQSADKPVGIWVIILASVCMSVGEVIFSPLGNSFISKYAPKKLLGTMLGVWPLVIFFAGKAYGPLYNWLENFDFIKAYGVITIIIVACGVIMLAFTKKFDKMVEGKMLKYILMILGGVIFIAGYYFMQQNEGRGKTMMFYSLFTYAGLTLVILSGARVLDPFFEGLGKNGEMIQLAIEVACFVIGAELLLKPAFEDQKEIGTKKNITPRGSGDSFSVKANKKESTKKTKKNNNQIKRSYSTGNKKYRKKMKNYQKYEKSYFMPPEVTYDWAKKDSVEQPPKWCSVDLRDGNQALIEPMSLDEKLEFFQMLVDIGFKEIEVGFPAASETEYQFMRTLIEKDMIPDDVTVQVLTQAREHIIKRTFEAVKGAPHAVIHLYNSTSVAQREQVFRKDKEQVKQLAIDGAKLLLKLANETDGNFTFEYSPESFHGTEVDYAVEVCNAVLDVWQPTADNKAIINIPTTVENAMPHTFACQLEYVHKHLKHRENVVLSLHPHNDRGCGVATAELGILAGADRIEGTLFGNGERTGNVDIITLGMNMYSQGVDPGLDFSNMRKIRETYERLTRMQVYDRQPYSGDLVFTAFSGSHQDAIAKGMAWRDEKKCDKWTVPYLPIDPKDVGREYDSDVIRINSQSGKGGVNYILMHSHGINLPKAMREEVGYMVKDVSDKAHKELTPDWVYQIFSDHYINTKSIFHIDECHFKQVDGITAEVTINHAGESKVITSNGNGRLDAVSNAIKQYFNISYELSFYEEHSLTKGSSSKAVAYVGIICNGKTFWGVGIDPDIIRASIEALIVAVNKIEELGSADACTDARMIEIMNYVQANYIDITLDDLAEKFFLSKPYLSKYIKEKSGMTFGDLVKKIRMKKAKALLKSSNMTVENIAMSVGYQNVEHFNRLFKKAYDMTPMQFRNQKMATKLLMLVIFFAIMVSVGIYARKHATSVDGYVLGGRSVGPWLTAFAYGTSYFSAVVFVGYAGQFGWKYGLASTWIGLGNAIIGSLLAWVVLGRRTKVMTQHLNSKTMPDFFGERYESKALKITASAIVFIFLVPYTASVYNGLSRLFGMAFNIPYKYCVIGMAVFTGIYVILGGYMATAINDFIQGIIMLGGIVAVILAVLNGQGGFIQAIKTMAEIPSDVPVTMGQPGAFTSFFGPDPLNLLGVVILTSLGTWGLPQMVGKFYAIKDEKSINTGTVISTLFAIVISGGCYFLGGFGRLFDAPELHDEAGNMIFDGIIPHMLSTLPDILIGIVVVLVLSASMSTLASLVLTSSSTLTLDFLKDNVMKDMSEKKQVRTMQVMVVFFIVLSVVIAMDPPTFIAQLMGISWGALAGAFLAPFMYGLYWKGVTRAAVWASFTAGVGITVLNLFFHFIASPINAGAIAMVAGLIVVPVVSVLTPKLKKDRVDEIFACYDEKVTITKKRSLEQNMLNDNFVTFEIGKAKHIALVAHDGKKKELIEWCDKNKEILKGHFLCGTGTTARLIAEKTGLPVKGYNSGPLGGDQQVGAKIVEGQIDFMIFLWDPLEAQPHDPDVRALSRIAVLYDIPTANNLATADFMLKSEFMNSTYERKVENFNKTIQDRVEKMKMKSLLILGAGGFGRMVAETAQALGYEKVVFLDDAVKDEAVIGMCCDYEIRHKEYPVAVAAFGNNKMRLYWTDKLLEKGYEVPAIVHPSAVVSPSAVLEPGCFVMQRAVVNTNTRIGRAVLVNSGAIVDHNSVVCAGAHVGLGSVVKSDCTIESGCKVEAGEVIFSTRRKIEGVDSRSLEDAVYAFGFGQQCSYVKPFGEGHINETYAVYMPGADGKDTPLYVLQRININVFKNPDQVMANIFGVTEYLRSMIREAGGDLDREALSYIKTKSGESYFEDADGQPWRCLHYVPDSVCYQMVERPEQFYQSALSFGHFLKQLGDYPAESLYETIPKFHDTVKRFHDFKDALRKDVKNRARLCREEIEFVLAREDDCGVLMKQLEEGILPLRVTHNDTKLNNILFDKNTGEGLCIIDLDTIMPGLAANDFGDSIRFGASTAEEDEKDLNKVHFDIELYRIYVKGYLEMAKDVLTPAENASLPWGARLMTLECGMRFLADFLQGDVYFKTTYPEHNLVRARTQFRLVKEMEEQFDQMQEIVETFMKNNFPHVFSPLTIRGMTLKNRVVMMPMGSDFAGHDGKLSDEHIKYYELRARGGTGLLYVRDVSLTERMPDAIWYMEEKRTGLFENGLIWFGAGVSIAEILTGTYLAPLGMGKGLAAIIVGHIIGCLMLFLAGVIGGKVRKSAMETVKMSFGQKGSILFAVLNVLQLVGWTAIMIYDGALAADGVMHTGRWIWCLVIGALIILWIVIGITNLGKINTVAMAALFILTLILCKVIFTGSGAGTPSDDSMTFGAAVELAVAMPLSWLPLISDYTREAKEPVKATAVSAVTYGIVSCWMYVIGMGAAIITGEYDIAQIMLKAGLGILGLLIIVFSTVTTTFLDAYSAGISSETVVSRWNGKHVAIVVTVIGTAAAIVYPMDNITDFLYLIGSVFAPMIAIQIADFFLLKQDKSSQAVHMPNMIIWVIGFVVYRILMNVDMPVGNTLPDMVITIILCLIAGKLIPEKNQKKMEYTEFGKTQLRVSRMCLGTWGIGGAGWDSYSDESRMDAIKAAVDCGINFIDTAPAYNGGRAEQYIGEVVHKLGVRKEVILATKCGNEFINGKYVRCGSADKIMRECEESLRNLKTDYIDVYLVHWPDPNVPMEETMDAINTLKKQGKILHIGVSNFTKEQMEEAEKYCAIEAYQPQYSMVDRKWEQLIRWACAQEMGVMTYGTFGGGILTGKYRELKEYGVDDNRNRFYPYFKEPLFSKVMLLLRTMDQISVERNVPLSQIALNWTLQRPFISSCIIGAQSRDKIEENCKVFEWKLSDDEMQMLEQALKKTIIMVFLCVHKREHQVPENSIPVEYRIKDEVFIPFIRMKLGDISCLKFVCVGTKNISDLAVKGLRHYFGSRNLEVRVKKSEIPLRYMNKIAFIGVGIMGRSMVRNLMKAGFELHIYARTRSKVEDVISEGATFHDTIADCVKDAEAVITIVGFPTDVEEVYFDAGNILESAKEGTYLIDMTTTSPMLDQKIAEEGTKRGFHVLDAPVTGGDTGAKNGTLSILVGGSREDYEACMPLFEAMGTNINYQGGSGCGQHAKLANQIMIAGTLSGVCEALTYAKAKGLDLQTVLDSVSTGAAGSKQLDTFGPKILAGDYAPGFFLKHFVKDMKIALTEANMSNLNLDVLSQVLANYELLQAEGCGDLGTQALIKYYEEEMDVMSEQLTIKNLYNHMDETIAKDIFEGATYPWEILPKISGFIKELGKTLPADEYDQVGEDVWIAKSATVFQTAYIHGPAIIGKNAEVRQCAFIRGNAIVGEGAVVGNSTELKNVILFNKVQVPHYNYVGDSILGYKSHMGAGSITSNVKSDKKLVVVKAGDERIETGLKKFGAMLGDEVEVGCGSVLNPGTVIGSHSNIYPLSSVRGFVPAHSIYKRQGEVVEKVEEMGKSLYIAEKPSVAQEFAKALHINTQRKDGYLESAEAIVTWCVGHLVTMSYPEEYDPALKRWSLETLPFIPQEFKYEVIPAVSKQFRIVSGLLNRTDVDTIYVCTDSGREGEYIYRLVEQQAGVKGKNRRRVWIDSQTEEEILRGIKEAKDLKEYDNLAASAYLRAKEDYLMGINFSRLLTLKYGNSISNYLNTKYSVVSVGRVMTCVLGMVVRREREIREFVETPFYRVLSTIGEKGATFEGEWRAVKGSKWFESFDLYKENGFKEKEKAEELIRFLSNSESDASQPLTCQIVSIEKKKEKKNPPLLFNLAEIQNECSKRFKISPDETLRIIQELYEKKLVTYPRTDARVLSTAVAKEIHKNLNGLMQYEPAKPYLQDIVKFGSHKGLEKTRYVNDKQITDHYAIIPTGQGMGALKGLPNLSQRVYDVIVRRFLSIFYPPAVYQKVSIVTKIKEESFFSSFKVLAEEGYLKVTGVPGRKNDNNDNNDNTDSRADSTEDKDTDVAFFARIQSLKKGMTLSVQSLDIKEGKTSPPKRYNSGSLILAMENAGQLIEDEELRAQIKGSGIGTSATRGEILKKLFNNKYLALNKKTQIVTPTMLGEMIYDVVDHSIRPLLNPELTASWEKGLTYVADGDITSDEYMKKLDDFVSRRTLAVKGLNNQYQMRACYDKAAQFYKKPVRKTGKTKKMDRELLNYTQNRELSWLRFDQRVLEEARDKSVPLLERMKFVAIFTSNLDEFFMIRVGSLYDMVQTDDRHRDSRSGMTPQEQLDAIYAAVAPLYKERDKTYAGIKKELSPYGVCGLDFKELETDEKKYVKKCFKEQILPVLSPQIVDSSHPFPHLMNKDIYVTANLKHINSRKNKDDKEKEQILGIVPVPTYVSDILMLPGHDIRYIRMEKVIMEYLDLVFDQYEVSDPNYICVTRNADVSPDDEALEVTDDFRKLMQSTLHKRRRMAVVRLETAEKLTPEMQEYFCKKFKITPEQIFRTKMPMKLDYMFSIAGNLPESMKKALVYEPFSPQKSAHVQDGNMLKQVKKNDILLFYPYESMDPFLKLIKDAAADPNVMTIKITIYRLAKKARLVEYLCAAAENGKEVTVLIELRARFDEQNNIDWSERLEEAGCRVIYGFDGYKVHSKICLITYRNRNDIQYITQVGTGNYNEKTAAMYTDLSLMTADPRIGQDAAEFFKNMSIGNLQGSYQYLIVSPVSLKSRILQMMDEEIIKGSEGRIIMKMNSVTDVDFIKKVSEASCAGVRVDLIVRGICCILPGVPGFTENVRVMSVVGRYLEHPRIFSFGTGKEQKIYIGSADMMTRNTEKRVEVACPVLDGQIRRQINHDLKIMLNDNVKARIMQKDGTYMKRAGGIKAVDSQAAFMEEALKAAEEVDKSQQRARENCGGGRVITFFRSLWHRKRMDKKLRVGILGATGMVGQRFISLLENHPWFEVVTVAASPRSAGKTYEEAVGGRWKMDTPMPEGVKNLIVKNVNEVEEVASTVDFVFSAVDMTKDEIRAIEEEYAKTETPVVSNNSAHRWTKDVPMVVPEINAAHFDLIKTQKERLGTTRGFIAVKPNCSIQSYTPALAAWKEFGPKEVVVTTYQAISGAGKTFKDWPEMIENIIPYIGGEEEKSEKEPLRVLGTLENGEIKLAEEPKITCQCLRVPVLNGHTAAVFINFEKKPTKEQLIEKLESFKGFPQEAELPSAPKQFIQYLSEDDRPQVKADVNYENGMGVSIGRLREDSMYDYKFIGLSHNTVRGAAGGAVLCAEALTAKGYIQAKMAQLWGGRFTKETDQLVYNFNASITFDKRFYKQDIRGSLAHVAMLAKQGILTEEEKEQITDGLNGILKDVESGKLEISDKYEDIHSFVEATLIDRIGDPGKKLHTGRSRNDQVALDMKLFTRDEIQEIDAQVKELLEVILHVMEENVETYMPGFTHLQKAQPITLAHHMGAYFEMFRRDHERLKDISKRMNTCPLGSGALAGTTYPLDREYTAELLGFDGPTLNSMDGVSDRDYLLELLSALSIMMMHLSRFCEEVIIWNSNEYQFVEIDDAYSTGSSIMPQKKNPDIAELVRGKTGRVYGALNALLTTMKGIPLAYNKDMQEDKEWAFDAMDTAKGCITLFAGMLKTMQFNKDRMEESAKHGFTNATDAADYLVNHGVPFRDAHGIVGKLVLTCIEKKIPLDELPLEEYRKISPVFEEDIYKAIDLETCVNKRVTIGAPGKDAMAKSIAAYQKYMEEYMLTKINYQKELDKLIDHLQKEEKVPTLLLHSCCAPCSSYVLEYLSSYFKITVLYYNPNIYPESEYSKRIIEQQTLIGEMDTKYPVQFIAGGYDKEKFYEMAKGLEKVKEGGVRCFKCYELRLRETAEIAKEGGYDYFTTTLSISPLKNAAKLNEIGLKLAEEYGVSYLTSDFKKKNGYKRSVELSAQYGLYRQDYCGCEFSMRQRLEEHRAKAMEQILNLQHISYTYHTLEGETPALSDISFSLNKGEFAAIVGPSGCGKSTLLSLICGLLPCSDGQITINGRHLKESTTNVGYMLQHDELFEWRTIYNNVILGLEIQHALTARTKKRAHELLNLYGLSDFENSRPSELSGGMRQRAALIRTLVLEPELLLLDEPFSALDYQTRLQVGDDIGQIIRNEKKSALLVTHDLSEAISLADRVIVLSRRPAAIIQTIPLIFHLEEDTPMNRRNAPEFKSYFNLIWKELNQDEKSSMKNLHKSPGTGAPAALSTGHRHYLRHYHFHRLLVIFFRIFLLTGFLFLWEFCASHQIIDSFIFSSPSKIMNALLLMISDHSIFLHLGVTLYETFVSFFLVIFVSILFAILLWYSNNLSEILEPYLVVLNSLPKSALAPLLIVWLGATKTTIIVTGMSVAIFGSILNLYTSFRSTDPGKIKLIYTLRGNHLHVLTKVILPYSIPAIISNMKVNIGLCLVGVIIGEFLAAKEGLGYLIIYSSQVFKMDWLLMSICILCVFAIFLYALIDFGEKLYFKHFMNQEMVEVRTIADGFLNYTKSTAISLNGIRLLCYLGILCRVALTDHSTRKIPGRYHIYILLIAAADMVLTGNSDLYNRIPGAAAVAGPMLVLSILIPGAFGGGDIKFMAVSGFLLGKEKIICSMACAVMLAGGYCLIMLKCGKLTRKDEFAFGPFLVLGIMMTLFAGDQLILWFWQGIMKKIWRQRLLSALLSIFMALAMTGVSVSVRTQAAENNSTVPSGTVKVHFLDVGQGLSILVQSDGKNLIYDGGDRKTSRFVVAYLKEQGVTKIDYLISSHYDADHMAGLIGCLKSFKVKNVISSNYVHTSKLYRSFVKAVKEDGLKMKHPPVGKSYRLGSASFQILAPETIEAKGSNNNSVAIKLTNKENSFIFTGDAEHESEKAMCNSGIDLNCDVLVPGHHGSATATSWDFLQKTVPEYAVISCGKDNKYGHPDKDTMDKLQSMEIQVYRTDKQGTVTVTSDGKNLNWSAAPCNDYTPGDESDKGTVTEQTVTKQTTQKVTEDQVWVSATGSKYHKTNHCGNMNPDTAKKETKEEAEAQGLKPCGKCYMKICKARQICRDVHGRENPKRPWQNFWFAYENLLKSFSEKNVMTDTTTITDTTQEVTEATQQAVKQVNQITQYLQDSIPGLITFGLEVLAALVAFFIGRLVIKWIRKIVRRSFERSEADKGVEQFVDSLLKYGLYGILIFCLISSLGFDTTSVAALLASSGVAIGLALQGSLSNFAGGVLILLLKPFVVGDYIIEDTNGKEGTVKEIQIFYTKLSTIDNKTIVIPNGMLTNNSITNATAKDERQLDLRVGISYNADIKKAKSMIEKLLSEDASILKEEQMNVFVNDLADSAVVLGIRAWVKNEEYWATRWRLLEEIKVELDENGIEIPYPQVTVHMKEDKMSLGLQYKNQEHIFDEKTVDGVPFLSYPMLEETGIVHHGFSTKLGGVSKGCWATMNISTTRGDDPEDVEENQRRIARAIGVKPEDMTFTNQTHTTNVAVVRAEDKGRRFMETDGMITNVPGICLVTFYADCVPLYFVDPVKKAIGLSHSGWRGTVGKIGKVTVELMQKTYGSDPKDILAAIGPSICQDCYEVSEDVIVKFQKSFEEKYWPELFYQKENGKYQLNLWKANELVFEEAGILKKHIAVTNVCTHCNPDILFSHRTTGNKRGNLSAFLALKMAGVYLTEKGYEILEYNYRCRFGEIDIIARDGDYLVFCEVKYRADDRKGTPAEAVDYAKQRVISKSALYYMTVNGIDEIPCRFDVVSIEDDRIILYQNAFDYVEIMNKREEEKLKRQQEKLKKELERTEAMSVYEKEHSDCQYICGIDEVGRGPFAGPVVAGAVILPKDDPILYLNDSKKLSEKKREALYDEIMERAVATGIGVVSPARIDEINILQATYEAMRMAIGNLKVQPDLLLNDAVTIPEVEIPQVPIIKGDAKSVSIAAASIIAKVTRDRLMVEYDKVLPGYDFASNKGYGTKKHIEGLKELGPSPXXXXXXXXXXXXXXXXXXXXXXXXXXXXXXXXXXXXXXXXXXXXXXXXXXIQAWNQQCKGMKEWQGRKEDKDEITVKPEVIMKEWQEYIMARRSREDAEESILRELGGWIVYILLIIGLTYFIITFVGQRTRVSGSSMETTLQNGDNLIVDKISYRFRDPKRYDIIVFPYKYEENTYYIKRIIGMPGETVQIKDGYVYIDGERLLSDIYGNELIKDPQTAADPITLKENEYFVMGDNRNHSMDSRDPSVGVLTKEDLIGRAWVRIYPFDNIGVIRHEMHFQWYPGHMTKAKRMMQENIKLIDLVIELVDARVPISSRNPDIDELGKNKARLILLNKSDLAEDKWNDAWSEYFREKGFSVVKVNSKKGGGIKSINGVIQEACKEKIERDRKRGILNRPVRAMVVGIPNVGKSTFINALAGKACAKTGNKPGVTKGKQWIRLNKNVELLDTPGILWPRFEDQAVGLKLAFIGSIKDEILQTEELAAELVKFMNENYPGVLENKYNVEEDTDPYGMLEKIAESRHCLVRGNELDTEKASVLLMDDFRNGRLGKLTLEYPDAYMRRRSNLDFEKRRRSRKTGYRRRKAKKKGFGNLPKAKKKIHLNLEMIASTFTWIFKIVVTCLVAFVAVWYWGQRVSTVGDSMSPVLKNADVVLVNRIVYNASSPKRGDVIVFKPKGNENSHYYTKRIVGLPGETVQIVENQVYINGKKLEEDYKTTKIDTAGIAGEKLKLGGDEYFVLGDNRKNSEDSRSADIGKVKRSYIYGKAWFVASPKKNWGFVKMNDIIKNIEAAQLKEVAPEFHVGDTVKVYGKIKEGNRERVQVFEGTVLKRQGGGARETFTVRKFSNGIGVEKTWPVHSPNVEKIEVVRRGKVRRAKLNYLRDRVGKKAKVKELVKMNFYIMTLFPEMVMDGLNTSIIGRAVNKGLLSIEALNIRDYAFNKHHSVDDYPYGGGAGMLMQAEPVYQCYDALARQITERKAKATEEKLASGEKKEMSGEQKRTRVIYLSPQGKTFNQSMAEEFAQEEDLVFLCGHYEGIDERVLEEIVTDYVSIGDYVLTGGELPAMIMIDAISRLVPGVLHNDVSAEFESFQDNLLEYPQYSRPEVWHDRKVPEILMSGHHANIEKWRREQSVIRTAKNRPDLLEKAELTEKEKKLAEEVQKEVKKSLMEELLQVGVITSTHGVRGEVKVFPTTDDPNRFKSLKHVLLDTGREKKSLEVQGVKFFKQFVILKFKGIDNINDIERYKRCPLLVERKDAVELEEDEYFIADMIGIEVVTEDDKPFGTLKDVMETGANDVYVIDTDEHGEVLVPAIRECILDVDIENQKMKIHLMDGLIMKELVEVIAKALVDDPESVVVNEREEKKTTVLEVRVAESDMGKVIGKQGRIAKAIRSVVKAAAAKEDKKVIVDIMDMAVKMRLRRMGQKKAPFYRIIVADSRSPRDGRFIDEIGTYDPNCDPSAIKVDEEAAKKWLANGAQPTEAVAKILKAAGIEKMAFDSLTEKLQNVFKNLRSKGRLTEDDVKEALKEIKRALLAADVNFKVVKDFIKSVQERAIGQDVMNGLNPGQMVIKIVNEELINLMGSETTEIKLQPGKAITVIMMAGLQGAGKTTTTAKLAGKFKLKGKKPLLVACDVYRPAAIKQLQVNGEKQGVEVFSMGENHKPANIAKAAIEHAQKNGNDLVILDTAGRLHIDEDMMAELEEIKEEVEVHQTILVIDAMTGQDAVNVAKEFNEKVGIDGVIVTKLDGDTRGGAALSVKAVTGKPILYVGMGEKLSDLEQFYPDRMASRILGMGDVLSLIEKAEAEIDEEKAREMTQKLKKNQFDFDDYLESIKQMKNMGGLGNIMNMLPGLGGMGGKMKGLDDEQTAEAERKMGRMEAIIHSMTPAERANPDILSPSRKHRIAKGAGVDISEVNRMIKQFNEMKKLMKQFGKPGKKKKFGFPFMNEILEQALLYDFYGELLTNHQKEVYEQFVLEDLSLGEIAREEGISRQGVHDLVKRCSQTLKGYEEKLHLVEKFVSIREKVKQIDELLDGYEKENAEKLVADIRKISDEIIEELMDLIRRYCRRQYLPSDILRQSCGEINFILKKLRCKEKTLDTCTEVLYDITGERHEMAKKNYYKILGVSRTASPEEISAAKNRLAKKYHPDANMKDGIDTTKKMQRILEAYRILSDPKKRASYDRKVFGKPSSDSDRNFDLFNLHNNIEETDPVIGTPFVNYWRAADSLYDITLESEQLFKDKNKENTRSARLSDLAAQALSYAVTLREAEIPEKYWLPAIMDWLLFTWYKNRNLPVSYLLKLYDEYSKKELNGFKRVKIQKEQLHFQHSLKRLVNYGMSDLGTANCGCGCEGRDRFGGDCGCGGCNGGCGCGNNGCGFGNNSCLWIILLLCCCGGFGNGCGCGNNGCGNDSCLWIILLLCCCGGFGNGCGNGCGCGCMAGKPSKPMTPFDKSVTPSYLYKLKLFLSFLPPSTQRFLAVYIKFSEFQYTMNYFRGLPFHAFSFQSIGELAPYMDENERNMMDQMTSMLQIMEMMVMAQTDSTSGGSDSCGPAGPVDLMKTMMSGEDMEMFQNYMDLFDQELSSLGTSAMKGDSSHEWNNESYSEMEIESRKVSDSIVETVHMVRPQHLNASDRLFGGALMQWIDEVAGMVAKRHTRRNVITASVDSLSFLRGAYVKDTVVIIGKVTYVGNTSMEVKVDTYVEALSGERTPINHAYFTMVALDKNDKPVRAPRLELETEEEKEEWEKGEKRRELRMMRKEEGLMRNIKLTIEYDGSRYQGWTRLGKDESGNTISNKITEVLKKMTEEDDLELFCGCRTEVGVHAYAQIANFKTSSSTTTQNIKHYLNRYLPMDIAIIDVKEVPERFHAQLNATSKTYVYRMTIDDVPSVFDRKYTYHCYRIPDKRLMQQAAEKLTGRHDFRNFSSAKKTKSTVREIFDIDIYGDIEEMQILIHADDFLHNMARIIIGTLMDIGLGNRSVQDIDDIFAGILEASAPCDPKGLYLQEITYMLAAERQAMIVELIKENGSVQVDELAKELNVSSMTIRRDLMKLESGNMIERCHGGAVAKQEVAYETKQTSNKNSKEAIARKCVEFVHPQDSVFLDAGTTTCEIAKLIRDIPDIIIVTNDLEIAQVLKKSDAKVYICGGMVQKETGSLFGRYATEMLKDFRFDVGFFGAASINEEFQVTTPTHEKMWLKRQVPKQCARSYLAVDQSKFGKQSMTWINQLEDYTGVVTDREFLPEEVEVLKARRVRIIVVMKESSRQERIIRTSLIGILVNLLIAAVKIVIGTLASSIAIVSEGINNATDAGSSFLTYVGTKLSGKHPDEKHPFGYGRIEYLTGMVVGILILYAGISMLKESIDGILHPSDMKVSMLMVLIVAGTAVTKFCLGMYTIKIGKSVESEVLLAVGEDGRNDSFFSGLTILSSVIFLFTGFSLDAYAGIVFSFVVIKSGVDALKNTASDLIGRSGKEELARQLYKEIRATDGVISAIDMMLHDYGPDRYSGSVNIEIDHKRSIGEVYEEIHRLQLRIMEEYHVTMVFGIYAVDEDTSSVVDIRRYIGKFVRVNEHVKSFHALYLSKGTNTLYCDFIVDYALRDWEGLRKSFTDYMKKQYPEYEISLTIETEFVMRCRYCGQRIPEGELYCRHCGKEVRIVPDYNPLDDMLTAQIKGAIDSDGYEDEMYYSRPSRNRDAAGRSTTDSRRGNERRSTGVARNNTRNRSRQMNEDERRRRNRERARQKALRKKKKKRALLLALSLLLIIGIVGIFAYMTSYIGAVNKGNKALERNDYTEAEDCFRNAMAKDDTRPEAYTGLSKVYQAQDNTEKAERLFSDALKKQEDNIELYRACIKFYIRSDQKEKIPELLDNATSTITDELPEYVVKTPKFSLDDGEDYDDVQQLKLTAESGNKIYYTKNKKKPTTGSHKYNSPIQIEEGDTTIYAIAVNKAGIPSLPVKKSYTVELPIEDAPAVSPSTGQYSTAQEIEIKVPDGYTAYYTTDKSEPTTSSTKYTGPVEMPEGETIFKAVLVNAKGRVSGITTRNYVLNMTAKSTKSKTNRKKTGTTSKKSTSNKKTTKKNTKKTTRSTRTAKSGNSFLMDEILIWITLAVSIILLISNFGVAGFLGDAVSGVLWEIFGAVAYIIPFVLFGLVSFQVSNKGNRYAYMKTVIAVLLLFLAEILLQLVDELGGKIGKGLASVLTPAIGVAGTYVVTVILMIICLVIITGKSALKGVKAGSDKAYARAKEDAKRHKEHAEVRKRKRMEQREQREKERAAAAADSGMHRRRDKHVEGVSFDTSIAKKSPEVRELPIDPKTAKGPEKPEFIIHRADPEPADYGKEDMTNEPEQKTPESENDPKTQEKPARRKNPKMGAAGMADEVADVAASVAADSVKPKKEYQYPPLSLLQRGKRGGGESDAHLRETAMKLQQTLENFGVKVTITNVSCGPSVTRYELQPEMGVKVSKIVGLADDIKLNLAAADIRIEAPIPGKAAVGIEVPNKENSAVMLRDLLESPEFKNSSSKISFAVGKDIGGKTVVADIAKMPHVLIAGATGSGKSVCINTLIMSVLYKADPNEVKLIMIDPKVVELSVYNGIPHLLIPVVTDPKKAAGALNWAVGEMSRRYQAFAKYNVRDMKGYNEKIKSLGVQTEEGDKLEPMPQIIIIVDELADLMMVAPGDVEEAICRLAQLARAAGIHLVLATQRPSVNVITGLIKANMPSRIAFSVSSGVDSRTIIDMNGAEKLLGKGDMLFYPSGYQKPARVQGSFVTDKEVQQVVEYLREHNGDVTYNQDIETHMNTIPTGNPASGSGGSEGNENDAYFADAGRLIIEKEKASIGMLQRAFKIGFNRAARIMDQLCEAGAVGPEEGTKPRKVLMSSEEFEQYLNEKNGMSEEKKEKEKSAEPTEELKETGSANLEGSRDNHRIKLLTIVGEIEGHEAVSGNTKATKYEHLLPMLAEVEDSSKIDGLLILLNTLGGDVEAGLSIAEMIASLSKPTVSLVLGGSHSIGGPLAVSADYSFIVPSGTMVIHPVRSNGMFIGVQQSLDNMIRTQDRITRFLSEHSSMKQERIEELMLNPTELVKDVGTLLEGKDAVREGLIDAVGGLSDALNKLHEMISDRNQKKNENVQIVIDKEEYEGDADELMMQVLDAGAEDFVEEEDSFEVLTDPDDFSAVRLAMEEAGIPMVSAEVTMIPQTYVELTDSKDIANIQKTLDMLDDDDDVQDVYHNWDEVIKLSIPDKPKSPKQLYYSGEREKMGENNLEKKLTINDIAQMSGVAKSTVSRYLNGGSVKDATAQKIKKIIEENNYEPNLFARLNAKESRIIGLTVPGFNSVTTPRLVEVIVAYLKKNDYTPLIMHTENDIEEEIRCIERLKNMNVDGIMVLATGSTKEYEEAVKKLKIPILFLGQRFPGENSVINDDYNAGYAVGNYIGQRKFKEIYMLWVPEDDPAVGGERRHGVIDGLMSCEKKPKEVIETTFFYENAIENVQKFVDHMKTPAAVVCATDRIAFGVYKVMSEKGIRIPEEVSVVGFGDYEAGELLQPPLTTVKFDWKNWGEISAESMIQMILGKPVSPLQVNPYEIIERKSVKENMGKNNEYLEISKQIVANIGGMDNIQGTAHCATRLRIVLKDNDLADIEKLEDIDKVKGAFIAGNQLQLILGAGTVNDVYEVFAEYTNTQNMSLGDLKEESAKRQNPLQAVIKALSDVFIGIMPALLAAALLMGITSVLGGLEVVKTHDTLYAINRLVSLASTGIFAILPMAVCYSAVKRFGGNPVLGMVIGAIMLDSSLANAYQAAQGTVDIEVIRLFGLKIEMVGFQGGIIIALMMGFVVAKLDKFFNKVIPDVIKLLVAPMLTVFISTVLLFTLVGPAGRILSNGITDGLMWSTEHLGAFGYALFAGVQQIVVITGLHHIIGAVEAQLIASTGTNFLNPLMSVALFGQSGAVLGYLSLNWKNLKARELCIPSFCSTLFGISEPAIFGVNLRYKFPLIGGCIGGAVAGAYVYYSKLTALGFGTTALPGMAIANPAHHGYINYIIAHAIAITIGFVCTVIFGKMWSAPDKNKNDKKNDTKENDTTKAVITEEPGAVYAAAEGTVKDIEASTDPTFANKVLGDGVVIFPEDGTVMAPCKATVSLVYPTGHAIGLTTADGAEILIHCGVDTVNMNGEGFETLVKEGQEVTAEEALIRFDIDLVKKHGYSPEILVIFTELPEGKTIKTEEKHIAKNDKMAEIVMNKETYLTEYPKHESMRENVKKDKNRLHFHMMPPTGWMNDPNGLCEFQGVNHIYFQYTPFLAGWGTKLWGHYTTKDWIHYKEEEPFLYPDEEWDRDGVYSGSAYTCEDGIHYFYTGNVKLWDKDYDYIMNGREQNTIHVFSPDGKNIAYKKLVMTNDDYPVNMSKHVRDPKIYKKDGRYYMIQGGRDAESYGCALLFCSDDLEHWKWYDTVRTAKPFGYMWECPDLFEIDGQQIMTCCPQGVDQKGYDYQNVYQCGYFPVEFDLKNKSYSFGKFQEFDKGFDIYATQTFADEAGRRILIGWMGIPDADYDNDATVAYDWIHALTMPRELEWKDGKILQHPLKEMKDLRKNAFTCELEAFTKWAPADCCFELRLDVEEAKNLELKLREDVTISWKDGLFTLSMGESGRGRKQRFAKVEELSDITIFSDTSAIEIFINNGETVLTTRVYSEHLEQKVELVSREVKGSVHGYELGSFEVEYKKMLSVASFMYCHAFVRSSMNITVRQSRQSGVARTTCPDMTNQSTIDKLIEMRLTAMADAFRIQMDDPAMKEVPFEDRFGMLVDVEYSNRKNNRLKKMRSLFYCLNRRSQKKSYNWVEFLNMLDNSYPLVRPRIYVNIYEMHLLDLLRIEIIRSLFDKEKADIPIVAMTANAFEMGMNDHIAKPIDVEKVEEVLVALLKEMIKTDAKTILADSIKELLKERSFLNIGVQDIVKNCDVSRTAFYNHFKDKYDLVSWIYRRDVEDIYWKLKKFDWRKYHTKILQYMQGEREFYVNVAAYEGQNSILDYITSYAIICMEMQVKEEMGMNILPEDVELSIYMWNLASTRLTFTWLKEKDERKPEEITDLICNCVPEPIKIYYQMKKRILAVLLATAMVASLAVGCGKSNDTTKTETKTENTKKGTGDGTFTMAIDYMPDSLKPNGAGTDSFTTMIRPLYSSLFYQTDSGMEYYLADKLDVSDDGLKYTVHLNDKATWSDGEPITADDIQFRIDYSMASSGRSSLATVNGQEVKLNKIDDKTVEFVLPMPYANFKNTLGDTVLLPGHAFNWDPSKVDDSGYFWNTDMATSGPYVVSEINDDSLVYTARNDYFGGKPNVKKIVLRTLGSGSSKQVAFENGELSYMRVTTADELEKYEKNDNYNVTSISEARLNYLQLNPGGTFANLPAEAREAIMIALNDQEIIDAAYGSDKLATRANSVLTPDQSLYNKKVPGYSQNLKKAKELAKSSGLAGKTLKYIYNADRANMEAVATVVQQQLAAIDVKLDVQGLDSPTFFSIFFAPYSGKTTDEYDIGSNGWDSERGDCGWQASTYMKNTGWGWSEDMTKLVNQADSATTQKEAQKLWNEIQKKYTDECWVYPLTYTNYVMVSQKNVTGLDGSKVVPEFVDWMSIKVKMWKYCGKKIIETLIIMLLISFFSFAIIYIAPGDISSMYITSDMSEKEREAVLEKLGANQSLPEQYAGWMGNALHGDLGVSLSNKSSVAPQLARRLPTTILLMGCSLILSLLIAIPLGLWAGYKKNGIVDNLISFLSYIGMSIPSFWLGMLLIILFTAELGILPSGGIHTVGNESVTDTIKHLIMPSITLSLGSVATFIRYIRANTISQLAEEYVLTAEAKGTSAFNILRKHVLKNTLLPIITLMGMNLASLVCGSFIIESVFGWPGIGMFAMSAIGQRDYPVIMAYIMLSGFILVSGNLLADILYAFADPRIKRGIDKANGKMENKIIIQENSFQRLEHKEPEKVKKYEHSMWKDIKSELLSNKVALISLIMLAIIMIAVLLAPLSPYDPYKIDVSQKLQGISAKHWFGTDDYGRDYFTRALYGGRVSLLVGFCSMLMTIAIGTTIGVFSGYIGGKLDVLLMRLTDIILALPSMLLMVVMNVFLQPGLMTLIIVLSLFSWASVARITRAETMSVKERDYVSAVRNLGAGNVRIAFKHIVPNILGSVIVAASLGVANAILMESSLSFLGLGVQIPVASWGSMLQGAQAHILDTPRLAVFPGLLILITVLSFNLLGDVLRTTLEPKISEMENLVEVKNLAVSYFTYAGEVQSVRGVTFDIKSGKTTAIVGESGCGKTVTAKALMGLIHRPGKVLEESQILFKGKDIINLSKKEKNEFCGKECSMIFQDALVSLNPTMKIGKQITENLTNHNKSIPKKELKRKATEMLQLVEIPDAEKCLEKYPHELSGGMRQRIMIAMALVTHPNLLIADEPTTALDVTIQAQIISLMKELQKKMGMSIVLITHDLGVVADIADEIVVMYAGKIVEKGKCRDIFYRRRHPYTWALLKSVPRVDYEKKQPLVTIEGGIPDMTNPPKGCAFCQRCPYAMNICSEYEPTKTTLADGHEVWCWLLDKRADLSKVPEEIRRRKDEMSNEEKRTVEMEVSHLKKYYKAGWHSVLKAVDDVSFRIYKGETLGLVGESGCGKTTCGKTCIGMLDKTDGQVLYQGKDVHSMSKKEHFTFTKKVQMIFQDPYASLNPHEKVYDIIAEGIQIHKLAKNREEEGKMVYELLEMVGLNAEHAARNVHEFSGGQRQRIGIARALSVNPEFLFCDEPISALDVSIQAQIVNLLMKLQKERNLTMLFIAHDLSVVKYISDRIGVMYLGKIVELADSSNLYMSPKHPYTRALLSAVPIADPDVSAKKEHIMLKGDVPSAVNPPTGCRFAGRCKECMEICRKVEPHMTEIETGHYVACHLYDMKYDFTTIMDRVGKDAIAVDVANMGNAFGPRDEAFDFIPMWIADMNFGTVPTVQEAIGERLAHPAYGYFMTREEYYQGIINWQKKRNAVEGLTKEAIGYENGVLGGLVSALNAFANPGDSILVHSPTYIGFTGSITGAGYKIVLSELKQDEAGIWRMDYEDMDAKIKKNKIHVAVFCSPHNPTGRVWEREELEKAMEVYKNNDCVVISDEIWSDIILNGNKHIPLQSVNEDAKNRTIALYAPSKTFNLAGLIGSYHIIYNSYLRDRVRSSSSKSHYNSMNVLSMYALIGAYKEEGMEWVDELREVLSGNINYACDFIKTRFEGVNLSKPEGTYMLFLDCKEWCEKNRKTIDALLKSGHRVGVGWQNGRPFHGEYSIRMNLALPFSRVEEAFERLEKYVFMEIEYVGKPVYSIFLCEYVYCQWIKLTEKLTEIIIKTVNSMNSRKIVLWQLFFSTLYLSAFTFGGGYVIVSLMKKKFVDELHWVEEKEMLDLVAIAQSSPGAIAINGAIVVGYKLAGIAGVLVSIIGTVIPPFVIIALLSVCYNAFRTNELVSQMLEGMQAGVGAVIASVTYEMGAGIVKEKDGISLLIMAGAFVASCVFEVNVVYIVIICGLLGVLRTCMSRKGAGKMIYLQLFLSFLQVGMFSFGGGYAAMPLIQGQVVTGHHWLSMSEFTDLITISQMTPGPIAVNSATFVGIKIAGIPGALAATFGCILPSCIIVTVIAKLYLKYRSMEVLQGVLGSLRPAVVAMIAAAGISILISAFWGSRNLIALAGTKWSLVVIFVVCMILLRKVKMNPIWVMVLAGVMKVGISLIMGKKTIEKNAITEGVIWKQLLIFFFPIMLGTLIQQLYTTVDTIIVGRFVGKAALASVGGPAAVLSTIVVTFFNGLANGAAVIIAQYYGAKDRKSLHVGLHTAYLFSIVISLIVSLVGTVLTPWLLTIMNTPQDMMADSTIYLRIYFMGILFTLVYNMGAAIMRAVGDSRRPLLYLLVCCVMNIILDIVMVVGMKMGIAGAALATVISQCVSAILVTWSLTRAYDAMKLKFRELRMDARVLKKELKIGVPGALQACAYGVTNVVIQASVNSFGTNTAAGWAAYGKLDLIFWTVSSALGAAVTTFAGQNYGAGKMDRVYKSIRVNVVISYIFTGAIIVILFVFCEPLYHMFTTDPKVIEIGVYMLRFLIPSYLLSVLLENLSGGLRGLGDVFWPTIFTFGGLFFVRLPWIMILTKIHHEVEVLLISYPLAWGGTLLCLIPYYFWRKKKRMKLAGRMKDMKELLHSAHLTKTQKIIAEYVLDNASEACFMTSTEIALKLGVSESSVIRFSRTIGFDGFMDFQKALRKDYQDKVLSISSSITVPSQRIAKQAKLDTSSDYINRHFKNAAHNLEEIFIQNSIETFEQAADLIVSSKHKYIAATRGNICLADFFLLYLKQMVPHVTMTTTTSMSPIDHMCNISHTDCLVLFSFPRYSSQDEVTAEMAHDAGASIIVITDKPSSLLAKYADILLTVPVDSNTFFNSMIGPQFVTEALLEIISHRAKGIEKRLNIIDKYLNKLGNYMLQTIENVNAAVNNFVWGVPAMVCIIGVGLVLSARTGFIQFRKFGYAIKNSIGRIFTKSEAKEGSITPFQAVCTALAATVGTGNIAGVAGAIAIGGAGAVFWMWVSALLGMCTKFSEVTLAVHYREKNAEGDYVGGPMYYIKNGLGKKWYWMASVYAILGSLTVLGTGNATQVNTITTSIDSALISYNVIDDAQISMVNLVIGIVIAALVAVVLLGGVKRIGTVTEKLVPFMAVFYIILAIGVVVLNADKVPHVFEMIFVGAFNPSAFTGGVVGSMFMTMRRGVSRGIFSNEAGIGTGSIAHACADTDEPVKQGMFGIFEVFADTIVICTLTALVILCGGEGIQYGVAAGAELTISGFVTTYGSWVTIFTAIAMCCFAFSTILGWGLYGARCVEFVFTTKVVKPFMIVYALVAILGATVDLGIIWGIADTCNGLMSIPNLIALFLLSGTVAKLVKDYFAKQEKKNMKVGCVKEIKNNEFRVGMTPDNVKSYVNAGHDVYIEKGAGEGSGFLDAEYEAAGAKMIDTAKEVWDTVEMMIKVKEPLPEEYPLFHEGLILYTYLHLAADKPQTDALLGAKVKGVAYETLIERNGSIPLLAPMSQIAGRLSIQEGAKYLEKRFGGEGVLLAGVPGTPKANIVILGGGSVGTNACKIAVGMGANVTIMDINLQRLAYLDDIFGARIQTLVSNDANIEKAVKEADLVIGCVLIPGKSAPKIFKKKYLKEMKPGAVFVDVAVDQGGCGETTKVTYHDDPIFIEDGVVHYCVGNMPGAVPRTSTIALTNATLSYGLQIAGKGLEQACKDNEVIYSAINTYDGKLTCKNVADSFDCYEYTDIKSVCMPVSWGVPAFCEYICPVGTLEGGIPILSTHPELRRVIGTLFSVKMVILVITLVGCLSICRFFCKVMCPLGAIYGLLNKVSLFHMDVNMGKCIHCGKCTHVCPMDVDPVKTPDSAECIRCGKCVSACPKKALKLGMRMISFIICLALLIGGYFVYGKVVENTFAPDDRETPAVRINDGVDYVVMPQWKLFLVQLLNIAGLGPIFGAMQGALWGPVVFLWITFGTIFAGGVHDYFSGMLSERNDGASISEVCGIYLGNVMKNVMRVFSVVLLVMVGTVFAVGPAGLIVTLLGNKGVTGALANPEVWLWIILAYYFVATFISIDKIIGRIYPLFGICLIVMAVGVIFGIFMNPNYTIPEIWTHFTNMHPAGKPIWSFMFITVACGAISGFHSTQSPLMARCMKSEKQGHFVFYGAMVAEGVIALIWAAAGCSIYKITGGLSTGLNDILANGQSSAIYDVCIKTMGGVGVALAMIGVIVCPITSGDTAFRSARLVLADWFKVDQNKMQKRLMLCVPLLAVGAFVGHLDYAIVWRYFSWTNQTLAMIVLWTASMYLFREKKNYWITAVPATFMSAVSMTYFFCAEECLGLSTKVAYPVGIILAAAFLGIFIHATKKPMKAMKPRRLGNVSIPDEELIKDRKECKKIGPCGIGKKAVYLSSFYIDRRYYIPISSVKRIFKRIAMSKGGFTGKGVFGTLSYLVVVYEDGKEKQCNFKHEEDVDRFLAYIEEEYPDIPVHSLEAERKLAEKERWLAEKQRERNVSEETKRCLVKLEQAEQYLKKQSDIYMDLSQSAKKKRTYDRSNPAYKWVALAIVLMGGAAFVYGIYALTTHAGFGMYFLLFGLAAIFLFAGANVLPTSKNNKNYIEKRLTESISQMEEYIRVYPDFPVPAHYAHPIVLKRMQEIMKEGRARNIPEALQVLKKDLKALNSSVVVEKEEYDEVVAIKPMFLVMDYKMKNGTRNEKVVFDIIFNLICMIYIIYSWMSITNVGVVTALTHNNGDAMLLIFGAAIVLIVFFIIDIISLILGKKQKGYLLPGYVGVSIGVKCIAILFLVLAYILKLKIMADKGRRSYIAIDLKSFYASVECKERELDPMTTNLVVADKSRTEKTICLAVSPSLKSYGIPGRARLFEVVQKVKEVNKRRICMAPGKKFAGTSVDNEEIKLHPELELDYITAVPRMALYMKCSTEIYNIYLKYVAPEDIHVYSIDEVFMDVTDYLNTYRMTARELAGKIIREIQQETSIAATAGIGTNLYLCKVAMDIVAKHIEPDQNGVRIAELTEISYRKLLWAHQPITDFWRVGPGYAKKLAEVGLFTMGDVARCSLGKPGEYYNEDLLYRLFGVNAELLIDHAWGWEPCTIADVKAYKPENNSMGAGQVLHCPYNFEQTKIVVKEMIDQLALDLVDKRLVTDQIVLTIGYDIKNLEQGTKKNVGEITTDWYGRKLPKHAHGTANLKQHTSSSRLMTQAGVKLYHEIVNPDLLIRRITMAANHVISEKEVQEEQQYEQMNLFTDFGIAKKEKEEKNEKLEREKKMQKAMLDIKKKYGKNAILKGMNLQEDGTAMERNRQIGGHKAMRNENVSKENISTKQILQERESVKNISKENRIEFSGKLQKSVLEVQRKYGDILGFPHHVSETHPPMPTADRAAQFTPFAALNGYKEAIEETERIAEEKVEREYEMEDTGKLEERNKIVSELQTIIKERIELKEIEIPGTITFQVMSVDGGNVPVGAGEVLLLRYSATHLEYSHELEDENQKFHMALHIIYCKEQKGLFGKVKYKTIKHRKEIITEADWKNGKKVSLYEDMKIKDVEKQVGISKANIRFYEEEGLIHPARNQENNYREYSEADVEQLQEIKKLRLIGIPVQEIKEIYEDRLTLQEALSRRLDEIEKEERTLKETKLTCQKALKSKLDITSIDXXXXXXXXXXXXXXXXXXXXXXXXXXXXXXXXXXXXXXXXXXXXXXXXXXXXXXXXXQMISIWLLPKDYIGTHLYVGLISLAAVVGLLIIGTCSANMKVHLTLLLLGAVVQPVGLFTIGTVMGRGYIVCRDTAVLKQYVIYLYGGAFILAIILWMGSKLNRYILNKLWISMLASLIMAGVIAQMLNQKYGHLMATGELIVGFLCAVIYLAAVSGTWTLANADWGKYNRYHAVYTSNKMINVFATIFNAAGYYSGKNWRRMNYITFNEIIEVNGLLEEKGLNFKVHLRDACGKQSCWIEPLGNCACEGRYEEMYQVVEEYFRRKGQKITFDETKLNFFAVMARRKSQKRRNKKYQVNNRQLKSKRPYKDTIFRMLYHDKENLLSLYNAVNGRNYTNAEDLQIVTLKNAIYMGMKNDLAFIMDMNLYLYEHQSTYNPNIPLRNLFYIADEYQRLVVQKSLYSTVIQKIPIPRFIVFYNGTKKVDDYNEFRLSSAYENPTDNPNLELRVTMLNVNDGHNLELMEHCRTLKEYAKYVARVRKYVTQNIPLEEAVTRAVDECIEEGILAEFLMKNKAEVIKVSIYEYDKEFEEKKLRKAEYEAGVEAGIELGERSLLENQIRKKLKKGKPIEQIADELEEAVTTIQRIIEETKKENMESNKEEQITTVSEENIYKLNGRVPLRKAIPFGLQHVLAMFVSNLAPVLIVCSAAVLRSNGAHLSSAEITQLLQCAMFVAGIGTCLQLYPIGVIGSGLPIIMGVSFTFLGSLLVIATNPNLGYEGMVGAVILGGIFEGFVGLSAKYWRKYLTPVVSACVVIAIGLSLLPVGMDSWGGGSGVKDFGSWYHLVVGAFTLIVCLVSREVLKGVYKNLNVLVGLVFGYALAIIFTVAGIAPMVDFSGIHKTIQEVGVFSIPKLVFLTSHKPVFNLGAFFTIAIVFLVSAAETTGATTAVCTGALGRDLKVKELRGSLAVDGFSSAISGCFGCLPLTSFSQNIGLVTMTQVINRFTILMGALILILASLFPPLGAFFNSLPQAVLGGCTVMMFGSIMYEGIKMLKECKFDDRTMIIVSLSFSIGVGLTQTSGNFFTAFPSAVGDVFNGNAVAGVFVVSLLLSLFLPKKTKVEMGIRICLDEVLKKKGMTSKELCRQVGITEANLSVLRSGKAKGIRLHTMNRICYFLQCDVGDILKFDGNLDEEEGEMKMKSFEKFRKPLTSLMRFLEILHWFDGIVLLWAGSAIPMHSVHINGAIFGIKQDTMMNAYGMFFTLIDAKGNMRMHLVSVWLLLLGATSILLALIFRNVHKILKSLEGTKEQPEMGTTFTAENVERVKKIGIYSIVMPTIQNVVVYICGVLIKMNGLKDINFEVRGFIFGIIVLCLAYVFSYGVNLQEEVDGFIMQKSIKSLKRNGILLLAYDLLVLCIVFVKNGMINMSAEAATSLIVSIGFGIFINLLWIVDSKTWITDYGKRKCIWSYWCGEIVLLLLVVALENMNQLVATSAILGMMAVYLIIGIWWVSRKLMELRQLEYFREIASTGSINEAARHLNMSQPPLSYQIRQLENELNVKLFDRTSKGVTLTEAGKLLYDRSGNLLEYARSTELEVSKTGKKRILRIGLTPTTVDTIMPYISQFSKKNPDVNFEVHDGITYSLYQYLLDGIIDISVARTPLRLDEVSYMELCSEPMIAVSAPKNMVSKTADVTTDTPHNSSKHNAVSSLKLSDLLHRPLILYRRYEELIMNTFHAQNMNPDIFCVCDDPRGAMLWAKEDLATAIFPQSMASLCDGLCIQELDEPDLITKILLIWAKGKKPVPLVQEFLDVCGEHMKRLEKFLRPYRRESILAPLFKLLEVVFDLMVPVVVAQIIDVGVAKNDHGYIVEMFFVLLLMAAVGLLCSFTAQFFAAKASVGFATSVRQAMFDHIQGLSFTELDTLGTDTLITRLTDDVNQVQNGINMGLRLLLRSPFVVIGAMVMAFTINVRCALIFVVTVPILFVVVFSIMLISIPLFKKVQAGLDCVTGLTRENLTGVRVIRAFCREEQSVEEFEEGNRELTRLNEFVGRISALLNPLTYVLINGATVLLIARAGVQVNIGNLQQGQVVALYNYMAQIIVELIKLASLIITLNKSMACADRVSGILDVKSSMEYKVAAEQMKNEQINVDQRKYGTDGENEQADSNLAVEFNHVTFTYEGAGASSLSDITFRAKKGQTIGIIGGTGSGKSTLVSLIPRFYDPQEGTVKVNGINAKDYPQGELCSEIGVVQQRSILFKGSIRDNLKWGNDQASDEDLWKAITIAQAKDIVEAKLGKLDSEVEQNGRNLSGGQKQRLTIARALVSKPEILILDDSLSALDFATDAALRKAIGELEGNVTTFLVSQRISGIRQADKILVMEDGELAGQGTHEELMETCETYQEIYYSQFPEERPAAVKSSKETGKDLDKADKMTEKAEKGAAEMKKLLKLIGKYKIFLVFSVIFAAISVVLQLYVPVLFGDAIDEVVSAHQVNFDMMWYYLKQILIFIVISAFATWFMNLLNNRMTYRIVQDIRSQAIRHIQVLPLSYLDQHSTGDIVSRVIADTDILSDGLLLGFTQLFSGIVTIVVTLIFMFSKNVWVTLLVIVLTPFSFVVAKFISSRSYTMFRKQSETRGRQTALIEEMIGGQKVVKAFGYEKESSRRFDEINKELQNYSQKAVFYSSLTNPSTRFVNNIIYAGVALLGAFLIPGGTLTVGGLSVLLAYANQYMKPFNDISSVVTEMQNALACADRIFDLLEQKEETLDAEGAFATVDGNVTIDDVAFSYDKEKELIENFNLDVKPGMRIAIVGPTGCGKTTFINLLMRFYDVDEGKILVDGKDIREVSRHALRSSFGMVLQDTWIKSGTVRDNICFGKPDATDEEIIRAAKEARSWEFIRRLPKGLDTVLHEDSISQGQKQLLCITRVMLCLPPMLILDEATSSIDTRTELQVQEAFDKLMKGRTSFIVAHRLSTIRNASLILVMKDGKIIEQGNHEELLKKGGFYHKLYHSQFEGMTIKEIAKLAGVSSAAVSRYLNGGYVSDEKKEQIKKVIDETGYQPSAQARMLRTKKACLIGVVVPKINSESISRITAGIEKVLSERNYQMLLAGTDNTPAKEIEYMRLFENYPVDGIILVGTMITAEHRRFLKESKVPVVVIGQHTKYANCIYHDDYGAGEAMGCAVAAKSRKEIAYIGVSREDKAAGAAREDGFREGLKRSGKELKDGYYKVAEFTTESGYEKVLELLNEKHDIDIISCATDTIAAGAIEAIHTYAGSQIPKNVEDTGSRFRYILENTSIQVTGFGDNQLLKAVTGGIPTVHFGYKTSGIRGAELLLDVIERDESIPVEIKLGFRLANIDDPEENIEDMDYRKTAQDILDHVGGSKNIASAAHCATRLRLVIADNKKVSKEALENVDGVKGVFEASGQLQIILGTGTVNKVFAEFIDIAGITASSKAEAKEAAAEKQNWFMRAIKLLGDIFVPIIPAIVASGFLMGIMNSLDFMNSNGFLHINTHSSIYVFANLFSNIAYTFLQILIAFSAAKAFGANQYLGAVIGMIMIHPSLQNAYTVATEGVQQTQSVFFGLFKIDMVGYQGHVIPVIIAVWILAVIEKKLHKIVPEVLDLFVTPLVSVFVTGYLTLSIVGPIFVWAENAILGAIQWMLTLPLGIGSLIMGGLYAPTVVTGIHQMYTAIDIGQLAKYGVTYWLPLASAANVAQGAAALAVGIKSKDKKIKSLALPSSLSAFMGITEPAIFGVNLRFFKPFIAGCIGGGCGALYASLVHLGAKGTGVTGIFGILLCLNQPLQYLIEMVIAVGVAFVISFLIYKDAEPKAATETAAVENIETADAVTTDATTADTTAETAEETLTSPVNGTQIPLSEVADETFASEMLGTTVAVEPADGKIVAPCDGEVSNIFETGHAVCITTESGGELLIHIGIDTVKMDGKGFTKKVSDGDKVHAGDILVEADLEEIKNAGYQTTTMMILTNTDEFGNVTKAEPAEVKTTSKVMTLTKMNALTRDLVKLVETAEQSQKTREELSVSDRKFREKLHLMPPVGWLNDPNGLCQFQGIYHAFFQYSPFNAEGGVKMWGHYTSKDMIKWEYQGTALYPDQPFDCHGVYSGSAFIEDGKMYLYYTGNVKLEDGEYDYIRTGREGNTVLVITEDGKTFGKKKELMRNSDYPDDLTCHVRDPKVWKENGTYYMVQGARTNEDVGQVLVFESEDKVNWKFRNRVESEKPFGYMWECPDYFKIGDKKLLSTSVQGLEGGIWEDRNVYQSGYFEIEGDILGEYKLSEYHLWDYGFDYYAPQSFETEDGRRIHISWMGMPDCEEYSNPTIQTGWQHCFTFPREIFEKDGKICQRPIRELEEKKHLVSDVKGMLAGEGYPVYEMTISDITKNRFKVILSEKLILDYADGKFRMHFTDQDKTSVSSGRSMRYVEVEEVENLKILADTSSVEVFVNDGEYVFSTRYYPEVYKLQAEAVGAQITLSEIMMTKKVAVINDLSGLGRCSLTAAISVLSAMGIQACPLPTAILSSQTEYPSYYCYDFTDKMDYFRQEWKKLGTSFSGIYTGYVASVCQIEQIMHFLDTFQTADTFLLVDPVMGDDGVTYDMYTSGLLTAMKELVARADVITPNLTEFCLLTDIDYNSLQDPSLSIQQLISRFKDAGQTLTKDHEKKVLVTGIHFTADDGVHKIGNLLLDGSSHFLSAYPCCNGSYSGTGDLFASCITGGLARDISLTEMMQTAGSFLEKSLIDSVKEHVPVNEGVNFEKYLYLLHTMKKKLVVVLLSAAMCVAALGGCGSKAGSSSDSSKKTAENSSKEDDQKAADEVAKKIDAIYVQERNDKTDEQCKEAKEAWDKLTDAQKELVEGENADPDYFGRDTGDASQDDPLNEDNIGEKELLVVSFGTSFNASRAADISGVEKALQAANPDWSVRRAFTAQIIINHVQARDGEKIDNMDQALERAVKNGVKKLVVQPTHLMHGAEYDELTETVNSYKDKFESVKIAEPLLGEVGADATAINEDKAAVAKAITAEAVKTAEYDSLDAAAEDSTAFVFMGHGTSHTAKISYSQMQAQMEQLGYKNVFIGTVEGEPEDTSCESVIAKVKDAGYKNVILRPLMVVAGDHANNDMAGDDDDSWKSQFEASKNFDSVKTQIAGLGEIDAIQQLYVAHTKAAMDAQMLRKRLMAVVLSAVMTAAIFTGCASKDDSSKSDNKSAKTEQQKSDAKEEKSKDSKSEAAKAPIEDGTYTAEFKTDSTMFHVNEANEGKGTLTVEDGKMTIHISLVSKNIVNLFPGTAKEAQKKGAKLLEPTTDKVTYSDGTTEEVYGFDVPVPALDEEFDLALIGTKGKWYDHKVSVSNPVKAEMNKNSYFPYIVQTTKRWGIRVFFVSNNAKIHKNSKNAMLKCTNIELTVKRNKKQEGNKRMKGNVIVGQSGGPTAAINASLAGVYRTAKDRGANKVYGMLHGIQGLLKEKYIDLSDHIKTELDAELLKRTPAAFLGSCRYKLPEIHENREVYDKIFEILDKLDIEVFIYIGGNDSMDTIKKLSDYAIIFGHAIRFIGCPKTIDNDLALTDHTPGYGSAAKYIGTSMKEIIRDSFCLEYEKGVVSIVEIMGRNAGWLTGAAALSKGEDCEGPDLIYLPELPFDLQLFGEKIKQLLQEKTSIVVAVSEGIRTEDGTYVCELGNSIDFVDAFGHKQLSGTASYLASYIAGEIGCKTRAIELSTLQRAASHAASRVDILEAYQVGGAAVKAADEGDTGKMVVLKRLSDDPYQCGTEVKDVHKIANDEKLVPRNWVNEEGTYVTNEFISYVRPLIQGDVSPVMVDGIPRHLYTPKELSHRMLQQKESYDVLRLIEHGQLCYISSENVQGKTLDRYLKYHPVIKKREIFLLLKEIAGQLASFHRCRGNPCYQYVNPYSIVRSEDGRIYFLDMQSEANRSKMIFMQRRDIREYFLPPDEKYYQHASKELDMYGLGKTFQYILASVEAEPRFNRREEYRLQRIISKAMGIRSTHYLNVSEIQKQIPRYEEKDRDKILNNKGKRRKKVCITVVLSIVFGGYLFINAWENAEKANQREMKRTESSKSEEKKSEKSDDRIKKKIYERDEEYLELALAYFLNVGDMKKSLKCLNQMENQTLAVNLKRLIKAYEKQKVPEEAEKFAASLAYLENEWKERSMQSEEKKKQAIQCLIRGYGLLDDKESSEKVLNLVEEGLKTDYLNDSAKRELLQYQASALEKEEKKEEAANIYAEILEDETEPGKREELYKKMVQLYETAGRRDMASDTCIQGIKELGESEELKLTHIRLICADPAVNRDTCALKIKEYVTEDTELLKNAEFKKLQKEYGIKAEGGNIWVGRMGRKIKKVIMIAAFGMVTGGQIADLLPEGNVMQVEAGSRKQIIKVKNKGKDSKKEFDKDKDNAKDNEKDLIEEGEKEDRKDSEEDREKDDKKDDGKAPEKGDEKDDGKDSEKDDEKEDGKDPEKDDEKEDGKDSEKDDEKDDGKDLEKDDEKENGKDPEEEEIKMYHAEYEDPDGQNGYYISAPTGKITHLSKNGVTRYLFENGNGERQEGTLEKLNESCRLKQLNFADGRNELEVWMEDEEHHQIENSESRKEFWIDSVRPVIGLEVSGGADIWHKEAAEVVVEASDGSNGSQIAEIICKTGEKIVGKSSKGAEKFVITESSQNGESTPVTIIATDYAGNQTVVTDRVFVDRDAPKALIQGVEDYTITSKPVQVSYLAEEENVIQTVRANILKEDIDGKKEETEITEWKTKSRNESGDTKKESVQTLAEDGLYKLRMNVTDMAGNVSHAERQLIIDKENPVIAHVDELDGKYLKKFSWNYSIEESIKDFTNYTYVMKVDDAFYRPGEKIEKEGVHVLTIEAFDSAGNKGEAKARFTIDHTPPVIEFEGIEDGEKYEKEKTFYVRTENLEDQIEYIKINGKKQNRKKQKKGYEIQLNEAKNYEIEVKAKDFAGNEKVSQIGFEIYEEKSLWQKIVEPVRKYIFYGNEKVIQDEKMVKEDKKEGKKKNIILWERAVLFGALIVVGIWKREKVKEIWKNLSMKYISFAIPCYNSQDYMAHAIESILPGGEDIEIIIVNDGSKDRTSEIAHEYMEKYPTIIKVVDKENGGHGDAVNSGLMHATGKYFKVVDSDDWVDEDALHKILDVLRHMEEDGMELDMLIANYVYEKVGATHKKVIHYRNVLPQDEIFRWDDMGHFRLDQYILMHSVIYRTDMLKLIQLHLPKHTFYVDNIYVYYPLPHVRKIYYMDVDFYRYFIGREDQSVNEKVMIKRLDQQIFVTKTMIDMYQLKDIGSKKLRQYMLNYLAIMMTVSSILCIRSKNKENLEKKKELWQYLKKKDMRSFIRIRYGILGQTMNIPGKSGRKISSLVYIVARRLIGFNMTEHTHTDKTLQGNDKIESAIAALQHEPSQEMLAHVLTVIRRRMNEHGELIIAVDPSSAASGLQVQAIQTDDGRKWWAAFTSFDEELKGSGSVMSTFLTDMKQLFNSAITADNIQGIIINPWNRTIMLDKALLRIILGEISIMTNKEKYKQAFDTLSASDNFSMEVDKMSILNRKHKLKTIAAAIAACLIVTAGTGTAYASDLGGIQRKVQLWIHGDQTTATLTINSDGSYTGTYADKDGKNKEFGGGGIAFNQDGSERSLTQEEIMEELNAPDIEYEKDGSVILYYKNQSIDITHKFNKDNICYVKLVDGDDSLYVTVKYNNGYASSPNKYISPWEFNMKPATQVLIERYQKHLYAIAFNICRNQQDAEDVVQDTFIQYHTYKKEFDTEEHIRAWLIRVAINKAKNITRSFWHRNKCNLEEYMETLTFETPESETLFDTVMKLPEKYRIVLHLFYYEDYTTQEISDILHLSVSNVKTRLSRGRALLKETLKEEWNDDEMALVGIVDVFVIGFVGAALYRSFGKTSTTMYISVIANILNVVGNCIGVFGLHAGVIGVAVPSLVSRTFFAVVITILCFSKKNPVRYLKNWIVKIDVNLQKKILGIAVPNGIEYCRRLSVYCKCRMKKNIGAQLALYPAPVIVVGAIVNDKPTWTLVAHAGTMAHSHLMVSLVHAHYINQEIIESKKLSVNIVDEAWLKEADRMGVISGNKEDKSESFAYTIGENGALLIDDAKVSIECEVDGNYELENFDNFVCKIVATYAKKVFMPARSEERTNARKEEIINACEMLYQTMNFKDITIKEIGNVTSFSRTSIYNYFETKEEIFLALLKREYDAWILDLHKIVEEHESMDDEQIASAIAKSLDQRHQLLKILSMNHYDLEENSRIEMLIEFKVSYGNSLRAVMGILAKFRPDMDIEKRQEFVYAFFPFMFGIYPYTVVTEKQKKAMKEAGVDYTYNSVYELTYTAVKKMLKMKTLVAYFSASGTTEGVAKKVAEAAGADLFEIKPEVPYTNADLNWMDKKARSTVEMNDPSSRPATTGTVENMEQYDNVIIGFPIWWYVAPTIINTFLESYDFAGKKIALFATSGGSGFGKTVSRLEGSVDKSAEFVSEKLLNRAGKAEIESWLKSWMMYLISVYFDDKSNKIISNYINKIAQKTGNTFMTDNHVPPHLTIMSVEAREEKKLTEVMEQLERSLTKGQIQLVSVGVLLPYVLYAAPVLNLYLEDMIEQVHDMVKHIPEVRMSRYYQPMQWLPHITLGKKLSKEQMQEAFSVMQELFAPMEVTVAEIGLAKTNPHQDLIRVELNDMQRISKDDPGIEFMLFLYYDRIFCVIISERIRRLKKNMQQLIMKKYIGILAKITGFILIVILAVNIILPLIKRNPDAAYEKELEQTTFTEETMKDVGGNQAGKKNAERIRCIDDNEEALLWRLRMIGNAKKSIVLSTFDLRPDDSGTKIIAALYTAAERGVQVQILIDGIYQKLFLEKSPVFQALAAHQNIEVGIYNPVTNLMRLNYRMHDKYLIIDESMYLMGGRNTNDIFLGDKKTRINVDRDIFVYEETQGKGESLQALEKYFDTIWNEAQVRKKKKTYAASYEEKYKSEYHQLKERYRSLKEKYPDIENYEHWEDDTYEADKITLIDNGTQTARKSPKVLQAIGYIAGQGEEVVIQTPYVICNSYMYQKLKQISEKADLKIVLNAVEKGSNPWGCTDYLNQKENILGTGATVYELMNAHAVHTKTVLIDDNISIVGSYNLDMRSTYLDTELMLVIESKRLNEEIRDTENVYIEKSKEVKTDGTETEGSLYKKKVLTPEKKRFYAFLKIIIRPFRHLLMINREDMLALTRRMTVKRTSMTRIAGGYLDMDGYIDGTFNTGFLKLSPDEKEKNLQIAKVIPFADTNQNLKEYAFSSEKMKGDSMWKLLMGMRVCGLKNDALMETFYEIVGEQYQAMGDYAVYVFHDRYDIPAKGKDHVRQGESEEMFEYLICAICPVSGDYEPGEPECGFLFPAFMDGAAALNYVDVYQKDQAHPHTELLKMLGVWMHTMKKFIRYYAPYKAVFFLDLICAAVISLVDLAFPQILRTLTKTLFAEPADRILQALLPIGAGLLVIYILQALCKYYVSYQGHMMGANMERDMRQQLFDHYEKLSFSYYDQNNSGQMMSKLVSDLFDISEFAHHGPENLFISLIKIIGSFIFLFLINWRLAIPLLVLVVFMLFFSYGQNKKMQATFMDNRRKIGDVNSSLQDTLAGIRVVQSFANEEIEREKFRKSNQGFLRSKDANYKCMGSFMSGNLFFQGMMYLVTLVFGGWLIAHGKMEAADLAMYALYIGIFISPIQILVELTEMMQKGLSGFRRFLDVVETEPEIVNAPDAESIDEVNGHVSYENVSFHYSDDDTPVLSNVTFDIPAGKSVALVGPSGSGKTTICSLLPRFYDVTGGRVTIDGKDVRDLTLESLRNQIGLVQQDVYLFCGSIKENIAYGKPGASMEEIEDAARKANIHDFIMELPDGYDTFVGERGTRLSGGQKQRISIARVFLKNPSILILDEATSALDNESERWIQKSLEELAKNRTTITIAHRLSTIRNADEILVVADNGIAERGTHEELLKQGGIYAHYNEMGMGKIRIGIVGYGNIGRGVEQSIKRNDDMELKAVFTRRDPASVKIQTEGAEVKHFDDMEAMKDDIDVMILCGGSATDLPVIGPKVAASFNTIDSFDTHAKIPEYFANVDKAAKEGKNVSIISVGWDPGMFSLNRLYAESILVQGSTYTFWGKGVSQGHSDAIRRIEGVKNGIQYTVPIEAAVDQVRSGSEPELTTRQKHLRECYVVAEEGADKAAIEEAIKTMPNYFDEYDTTVTFITEEELKENHSKMPHGGFVIRTGETGCEGNKHVIEYSLKLDSNPEFTGSVLVAYARAAHRLSKKGESGARSVFDIAPAMLSQMTPEELRAHMLMQTTNSDFIDIMEKNHMEIPWHDYANDDSNVLIAEAGLIEKASVIGRVGLIMLSCGTGAWRVRTSMNRLSKELGVTCTVDVGLMSIVFNCFDGNDCVSQSLSIANTGVNTSKLYRMEQFVDHFPEEEAHMTGEDIHKRLDEIEEIHALYSPAKLGLAAALACCGFTFLLGGGPVEMALAFIAAGIGNLIRTKLIKHHYTLFLNIAVSVSAACFTYAVFLKLAELVFHIPEFHEAGYICSMLFIIPGFPFITSGIDLAKLDLRSGLERLTYAIIIVMVATLFAWIMALLLHLEPADFTALHLSAAARLIFRVIASFCGVFGFSIMFNSSHSMAATAAFIGAIANTLRLELVDFTHMPPAAAAFIGALTAGLLASFIKKSNGYPRISLTVPSIVIMVPGLYLYRAIYNFGIMSLTDAVSWFTSAIMIIVMLPLGLIFARILTDRTFRYCTMEEKTLFPREEKSEILFKKISEDKWACEKLMETFCSYLFSNDGVDLPDSPSSTEFAQALFNSYRNRDLSAFLMAICQNTVFDLLRNAFLIPYRFNADGKQNPMIMTDENGMLLPEYKRSIHEREYRHFHEVYTDLGAPKNIFLAQAYRYSHSYTSDDMEPEQNILEKNNGVLLIRELPDTVKLKETEAEAYSAILDIVIKLQKELPMSYVFYGQDSLVEDNTRYDEIGVFLPNSHFLKNLERHVSKAEAIIYADNMYYTSLSKQIIINPSIENIIKNMKNIKESHQGQQKRQKTMNTPFRYDFVGSFLRPQKLKDARKNFEEGTISQEKLTAVEDECILELVAKIKELGYHVITDGEFRRSTWHLDFMWGFEGIEHQKTVEGNTTFDAEAAMIDDTYMTGKISVKNHPFVEHFKFIKALEDENTVAKQTIPSPGQFYAYFTGAQLLNTTLEIYGSEEAFAEDVIKAYGEFVQEIYAAGCRNLQFDDCVWGGMVDAKMAVALTGRTGQRLEDYKKLLLELNNQVVAQAPEDLVINTHVCRGNYHSTFFSSGAYDSVADLLFGEENVNAYYLEYDDKRSGGFAPLAKVSGDKKVVLGLITTKTPELEDKEKVIARIHEAAKYVPLDRLYLSPQCGFASCEIGNKLTEEEQWAKLKLVKEIADEVWSDRMVALLPEGHKLAKRKTFSAKFAETEAYIVTCPGLDIDGTRYLDKHGIKPNVQFSTMDIQATYAMAAAGMGVSIKIVLSSGSMIYMDVATMVAINNLNMVTVMAVQAPNNVITIVNGERTEEDMDGSMLDQYMGKDCTVSLFNEVGAIKGKLMDADIQWVKVDTKKGTQLINRNMVRNITFDNKMIIVNGKEINLTEDTTVAEYLEQNQYQVKRIAVELNGDILPKYSYSDTMLKDGDRLEVVTFVGGGMGEIVSENMTKNANAKVLSKEEIMAALNERHSPEKQKHLSAGRVAIAGLGGLGSNVAYALARIGVGHLHLIDFDVVDITNLNRQQYFMEHIGMYKTDALKSLLLKINPYLDIYTDCVKVTEENLKALFRDEPIVCEAFDNPEAKAMLVNGILEYFPGKKLVSATGMAGYGSSNTVRTQKLMKNFYLCGDRETAPTYGNGLMAPRVAICAAHEANMITRLILGEEDVMDKKEIKNTDTFTLGGKEFTSRFILGSGKFSLDLVKACVEKAGAQIITLALRRANEGGLANILDYIPEDVTLLPNTSGARNAEEAVRIARLSREVGCGNFVKVEVVRDSKYLLPDNYETIKATEILAKEGFVVMPYMYPDLNAARDLANAGAACIMPLGAPIGSNKGLSTKDFIQILIDEIDLPIIVDAGIGRPSQACEAMEMGAAAVMANTAIATAGDVPAMAEAFKKAIEAGRSAYLSGLGRTIERGASASSPLTGFLQDMGTNHEDTHINESILSEEILEDQKKNRIDHMTYLPGMEDIGSEILDQVVAAMEAYDYNTYTAEDVKRALAHAERTPEDFQALLSPAALPFLEEIAQAAQIETRKHFGNSVYMFTPIYIANYCENYCIYCGFNCHNKINRAQLNAEEIEKEMAAIAETGLQEILILTGESRNKSTVEYIGEACKIARKYFKVIGLEVYPVNSDEYAYLHECGADYVTVFQETYNSDKYETLHLAGHKRIYPYRVNAQERALKGGMRGVGFGALLGLDDFRKDAFATGYHAYLLQRKYPHAEIAFSCPRLRPIINNDRINPMDVHEPQLLQVVCAYRLFMPFASITVSTRECERVRDNLVSIAATKISAGVSTGIGSHVEDIEDKGDDQFEISDGRSVDEVYQALLKHNLQPVMSDYIYVMIKSVNNQDFKIIAVSNRKLCNRPFLEQIERVCKIHPEAVILREKDLTEEEYGTLAKEVMNICSRYQVSCILHNFWKTALELGCTSVHLPLPILQKITDEEKKKFTKIGISIHSVEEAKEAEQLGASYLTAGHIYATDCKRGLPPRGLGFLKEVCREVSIPVYGIGGIKFDEEQWNDMKKCGAVGGCVMSGMMEIMNTGIEFAEKLSKAYSETCKPLCHELNIPQTAFDILLFLANNPEYKTARDIVEIRKIKANLVSVNVDKLVNEGYLERKSVEGDRRKVNLICTEKSKEIIQEGQKLQQSFVEKLFEGMDEDTRKALQKGMAHMEANIEKMLEEKNMNTILMIIVTFFAGMGAGLGTGFAGMSAAAVISPILITFLGMDPYMAVGIALSSDVLASAVSAYTYGKNKNLDVKNGLIMMVSVLTFTVVGSYVSSLVPSTTMGNFSVFMTFLLGIKFIVKPVMTTKEAMEKVSPKKRAVQSLICGVMIGFICGFIGAGGGMMMLLILTSVLDYELKTAVGTSVFIMTFTAFTGAVSHFAIGGMPNIAVWILCIVFTLLWARIAAVFANKATPKTLNRATGVILVVLGIVVMAFSILNMNERLKQQLDFILEIDKEKNILRQTHLSGHGRRENDAEHAWHMAIMAYLLKDYANEPVDIAKVMIMCLIHDIVEIDAGDTYAYDTEGLKTQKAREDAAKERIFSLLPEDQKKELTSFFDEFENYQTPESKFAHSLDNLQPLLLNNSNGGGDWREHQVTSEQVYGRQRKTQLGSETLYKVTDQILKENIEAGNIKESMKQILCFGDSNTWGLDGETGKRFSWEERWTGILQEKLADRDIRIVEEGLCGRTTIFEDPLRLGRRGTELLPTLLETHTPDAVVLMLGTNDCKTIFGASAEIIGKGIARLLEQINQYADKMKVLVISPIYLGEKVWQDGYDQEFSPESVEVSKKLEPVYEKVAGKYGKRFMRAADYASPSEADQEHMDGQSHKILADAIYRKLEAEILMSTKKANLILTTCSMAWGTSYIFMKLGIEGLSPLMLMALRTGIAFLILVLIFFKRLLNVNKRLLLYSAITGFLLFTNLTPILYGLNTITASQSGFILSTTVVLVPIIHAIISRRLPEHHVRLGIIIVLIGMILINGGDIFAVKPGTLLCMLSAFSYSINIVLNSYFTRQVDPLALGVYQQGFTCLYSIIGLLVFGSPIFPSTALDWISVLGLALLSSAYGFVVQTVVQQYTTPENTGFLFSLEPIFAAIFSFIFLHEKLTEMGYLGAIFILAGVFTAIDAKSTVMELITGKSVAEVTSKRMLEKLRELGIRDDLIREITEYRETYPVEQEYGSRIPKLEQFYYGKEVWEQAITAILCGENILLAGPKATGKSLFAENLAGVFARPRWDVSFHVNMDAASLIGMDTFRGGEVSFRPGPVYTAAKAGGFAILDEINMAKSEAMAVLHATLDFRRTIDVPGYERMELHPATRFIATMNYGYAGTKELNEALVSRFVVIQMPMISKESLIKLIKKHYPDIREEGAGELTFMFLELHKKCENGEISSKALDLRGLLGAVGLMEKGLDIFTALDMGITNKTFDTYEQTLIRDTIRTRISKKTVKKDLFVKMCYSMAEIEEQELREAKRACNFIWAAAENYELEPLFLAFASNGTADMYLNLIIGLTYKWYDQEKIDDFFNQLGGKDRELYEGLLWIGLENALYQKERKIRSVMEELRREYALDNLNRYRNYKEYARIEQIRNAHCREILEQPSELTTEEEELLHAFSYTEEMTTDEILEQTRENLWKYFSYRPSKAAKKKGVYFLQKVAGAFHSVGNVSTTYVRAKYYEDKDVGSEEKTGVIERSKHYLVQFSLKNDPGEARIYVEACFGKNMYPQTEQERIEQEICVDKHKNCHVLFTRGRSGWKEKQKSKTKLKELSEIKRKRERQEILEFQKESAQQYEKNKQYYEKNRAIYRNSIRKLTEKLRICLETQDETFPEMATHGKINPREVWKAVYLDNPRVFERKEEVEIPGFSVDMLIDASSSRKQMQEQIAAQAYVLAESLEECGIPAQIYSYCSIRGFTVMRIFKDYEEEQVGNELFGYVAAGNNRDGLALRAAGYLMEASKKAKRILLVLTDANPMDDQNIGEGAFYTNKEYTDQPAIEDTAREVQRLKQKGIQVIGIFMGSAKSREAAREIFDRELVQIQNINDFAGAVGRVLGEVMTPMTSQKLENLLNLALNSAEDEREKSLNLNVGYDPLDREWDLIIKYSVNLDRVRKIASKVTELQNEYAVIRITESRIDILSEIPEVEYVEKPKRLFFQAAEGRRVSCINAVQDTRLSLYGQGILVAIIDSGIDYANIDFRNADGSTRIRYLWDQSLNPADGETAPVGYSIGVEYTKGQIDEALNAQTVSEQRRLVRSQDISGHGTAVAGVAAGNGSNSGGRYAGVAMQSELIVVKLGNPIQEGFPRTTELMMGIDYIIRKALELRMPVAVNISFGNTYGGHEPYNMAISSNNVQVYTTLSKELVAEIDKDAKENFRTRSQQINMILTEYYKTRMTTNHESEMGGGNVNRETEHDLLQGTLAGKEYKMKKHITDEKTGISYTLCGDYYLPDLELKEQEESHYGKYGMLRKSFLKEHRPGLYSSYLLTGKLTAHLNEVDQQANERMEVLVDQMMERQAITEEPKVRDQMAWVGAVNNIRNAAEEIVLKEIVYIMIADRCEINRQIRVDNKMLRELKAKVAKLAEAVEKSIPIIAETLEAIRNHMIFTQYHLLHNEMQKEVIHDWMNHFNPILNKYNTVKKKLKAKVTERKELNVKKEKTSILNPIQHIKLNQQLTTITEEIEELKSRTEQLIFQAECSTDKDMTNLSKKYDQMNNNLDILDSQDISLKKQLEKDAAAFREEKFRPEPEQYTELLDTRIQIRPDFRDKLIEQLKGTFGKYYDYHRRDIAANEVDYLNVEDPDVFSHCTWELEYQRKQEMRRNQPARSKKKSHDMELYKVGKKKEYLTSSVAQEKGYERIDKHPKSSRYGRQNPISEQWNSDEQLCIWRANWADAVNEMLARNQINATIDHRSFADQGITEQPTIHEGYIAQNMEKKGMIADRCEINRQIRADNKMLRELKAQVAKLAQAVEKSIPIIAETLEAIRXXXXMKATLPRIWKRKAMMGRIDNQMQLLILDLDSMIPENHLLRQIKNSVNFDFIYEKASSFYSHTGRKSIDPVVMIKMLLIGYLYGIKSERRLEEEVSLNLAYRWFCELDLMQKIPDHSTFSQNRRRRFRDNTLFRDIFNEIIMQCINMGIVSGNTVVADGSFLPGNVSVNSSIEVIETVQQSSIHYLDELEKEMSEIPGYKEPITKEVTKRTLKSTTDPDCGYINQKRKRGLGYLTEMTVDTGHGIITGVNCYPANHRESDIILNHVKQQQEALPIDIKVLALDGGYDVGAVHRGLELLGIEGYTAIREYQNNALKKGFTYNQDKDCFVCENQKELNFQRLVFKRSTLNYYRLYSRARKLCKDCPRLSICEIDQGAIRINASGNYPAFHRNKLKYHTPEYVKVMRLRKIWAEGTFSVLKREHNLKRIHKRGIIRAEEECLFSAMALNLKRLVKAMMRFTNNKRKSKENLEKEIIRFYIEKQKAENRQNVTLEELYAEWLLYKRDYTSVKAKTIQEYVSEWNRFFKDTELVKMKIGEIKPITLIRFFREATKDRQFTHKRVSNARSVLNGIMSYAIEEEIISHNPVSDVNFKQFTYKPVEVQSDNVFSRDDTHKLLNYLRCIIEPYSLAIQLSFYLFIRVGETKAIRWEDIDYNNRLVYLHRQATCERTLNDDLSVMRIRFILAGFLKNRLDFLLPNIGKKFSLKIIPHTPLAMNVFKELGKDLNYKDILQVDGAFSACHINYGKSLKFNGADSKNMAQNSRKNSLTENGHIDDLEAVQYDFNGTEKDFKKQDIILLWEKYWLEYINAFNKLVAELPDSIVTVYVGRHAIELGFKYLMTKKNIKIEKDHDLKELYKKLDAVEKIDEDYMEYVDTFCEKYCKYIEGGNPEYFRYPEYKSSQYFAGNCLDAKWLSYNFALILLKLLHLADLEKEIMFPVYEQKKENVHILQKTSRHAPPHLHNSVEFIYVISGSMEIGMGQELFHMDEGDFAVIFPDVIHHYQVFEKGKNKSIYVWALPVITSNYMDTLQNLCPVDPVIKKADLHPDIKYVLQALLQQKNISKEKKEEIQNTSENVLEERSVEQAYIQILLARSLGKMKLMDKKSVESNDIVYQAVSYIAKHFREDLSLEKISKELGVNKFTLSRVFSGIFHKNFKQYINEHRLNYASAMLECSNEDITSIYLDAGFESQRTFNRVFKDRFRMTPREYRKRFREMIVPNYYENLQVLHENTMPYRAYYIPASKPMGTLVHDREKSDRFQLLNGDWKFKYYKSIYDLQEEFYREETLTETYDEIPVPGIWQNYGYDSHQYTNVRYPIPLDPPYVPQENPCGTYIHEFDYSKEEKAPKAYLNFEGVDSCFYVWMNGQYVGYSQVSHATAEFDVTEFMRDGKNRLAVLVLKWCDGTYLEDQDKFRMTGIFRDVYILKRPENILYDYFTTTKINGTDAEIEIRANFVGEGNIAENMKILLKNEDGTSVSEGHFERVAEENGYTHKATFIIKNPTLWNPEQPYLYQLILFSDAETIADRVGIREISRDGSIIYMNGEKIKFKGVNRHDSDPVTGSVIGINQVKRDLIMMKQHNFNAVRSSHYPNSPYFYQLCDEYGFFVIDEADNESHGTQTQYLQNSEWDNVVEQWNKRIANNPDFIPATMDRTKLCVYREKNRPCIVIWSMGNECAYGCTFEEALEWTKKFDPTRLTTYESAFYRSTDRTYDYTNIDIVGRMYPAFDEIDEYMKEQPDKPLLLVEYCHAMGNGPGDLEDYFELIQKYDSLCGGFVWEWCDHAIDKGTAENGKRIYYYGGDHGEEIHDGNFCMDGLVYPDRTPHTGLKEYKNIYRPARVTSIDQQAGEITLHNYMNYVDLKDYLYVDYELSRDGETLMTGSTEIEKSIPAGEEGTIKIPLYVPESGKCYLKVKYYLKKATQQMYDGEELGFDEILLENTDSRNQKVKKLLEDCKENQKVLMSLEVTETDSYLTIGIGSPKCLYIFNKQSGVFESLQKEDKELLERPMEFNIWRAPTDNDRKIKEEWYNAHYNQSYSRAYETTYEEIEHKVIIHCVSAIVAPTVQRILNIKSDWEITCDGTIKVNMQVEKDMEFPMLPRFGIRLFMNRNFDDVEYFGIGPDESYIDKCRAGSHGTYTAKVDDLHEDYLRPQENGSHTDCDYLEIKNKNTVFTAIGNQPFSFNVSSYTQEELTKKKHSYELEPSGYTVVCLDYAQSGIGSNSCGPVLSEKYQLNQNHFEFDMTLIWKMEEKKYLKWYNKVGYGSGDIAGNVVFAFLSSFIMIYLTNTVGLNAGVIGSLIAASKVLDGISDVVFGSMIDRTHTKMGKARPWMLGAYFGCAITLIAAFSVPTTMGKTSQYVWFFITYLLLNAGFYTANNIAYSTLTALITKNVKERVQMGSIRFMFAFGTSFIIQTITVGLVQKLGGGAEGWRTIAIIYAIIGLISNTLTVFSVKELPEEELRNGEEKVEEKYSLIESIKMLVHNKYYIVILVVDILRQTYSAIINCGIYYMTYVLGKAELLGTFSGAINLALIVGLAFLPMLVAKYKGYYKLNFSGYLIAAAGRGIVIIAGYMGNVPLMLAGTAIGAIGMAPWQGNLNALVAECSEHTFLQYGKRIDGTMYSCTSMGLKVGSGLGTAIVGWLLNFGGFNGQLKVQSQSCINMLHFMYLWLPMIINILVALLLTQLNVEKANEKLRIQKEIGITKMRKQVIFLMTDTTRKDMVGCYGYPKMKTPNLDRLAEEGIRYENAYTCQPVCGPARSAIFTGTFPHTNGMVTNSIALGDNVKTIGQRLYDHGIQCGYIGKWHLDGSDYFGNGRCPEGWDPEYWYDMKTYLNELTDEEKVKSRNPKECYKDDFSEEFTYAHRCSNRAIKYLEKHQNNDFFLSVSYDEPHGPSLCPKPYNHMYDGFKFDSCPNFQDDLSKKPFMQRLWSGKNLHATEDEINRPTDGLSLFLGCNSYVDYEIGRVLDKIREVAPDALVIFTSDHGDMLGAHRLFSKNAAAYKEVANIPLIIKGGAKGYVEEAMASHIDIAPTILDYFDIPIPKLMEGKSMLSQIENPEKEINDVIFTEFTRYEIDHDGFGGLQIMRAAISKRYKLVIHLLDSDEFYDMEKDPYEINNLIDDENYVEERNALHDKLIQHMNDTRDLYRGYQWRMRPWRKDFVPNWENEGYTRQRENEEYEPRQLDYDTGLPMKEAVRKKCMINVSGHLRNERRATGFEDLSTALTVNCCGMQIFKTKDYKQNRAAGRVDYQLIYIYKGAGHYYIHGKWKSLSAGNVLLFRPKEAQTYSYFFKEHPEIYWIHFTGYNCEKIIQKYNLHNCYIGEHSLLKTFFQEVIIELQLKKPFFEDMVLSNFWQILATIARSHQQILSPFGNDFSINRLVIQLNQTYMDDWNVESMAEYCKLSVGYFSHLFKKRIGSSPMKYLTELRIEKAKELIATNSMSLSNIAQMTGFNDPLYFSRVFKKTTGIPPKEFQQSLLTINTPNWWDEMKNISVLIKPASGACNMTCDYCFYCDEAAKREQKFYGMMSEETLKNMIRRTMLHSEGSVSYTWQGGEPTLRGLDFFRKALYLQKKYNRNHLQVINAFQTNGYGITDDWCMFFKENKFLVGVSVDGLPEIHDSIRHNKIGDGTFEQINKNIKLLDKYNVEYNILTVVTPKVAKNIKSIYAFYKQRGWHYQQYIACLDPYGEEHGKMSYSILPEQYGKFLVELFKLWYKDLQEGCHPYIRQFENYVGLAAGYMAESCEQRGKCGVQYVVEADGSVYPCDFFVMDKFYLGNLNTDIISKIDEKRKEVGFIECSERVNQKCKNCTYYRLCRGGCMRNRELGDKEYLNYFCEGYQIFFEHCYEEILKLGDRVNYRMIYWELFLSFLQVGLFSFGGGYAAMPLIRGQVVTVHHWLSMSEFTDLITISQMTPGPIAVNSATFVGTKIAGTLGALVATFGCILPSCIIVTVIARLYLKYRNMAALQGILNSLRPAVVAMIAAAGISILITAFWGNTGMISLVGTKWTLVVIFMICVVLLQKVKMNPIGVMALAGIMKVGISFIGGMEKKNKKKMLWKIFISTLYLSAFTFGGGYVIVTLMKKKFVDDYHWIEENEMLDLVAIAQSSPGAIAVNGAIVVGYKLAGILGTIVAIIGTVIPPFLIISIISFCYNAFRSNYFVSQMLEGMQAGVGAVIASVSYEMGAGIISKKDVVSVLIMIGAFIAACIFNINVIFIVIISGIIGIIRTCVIGKERMMTLRHLHIFVSVYEHKSITKAANTLHIAQPSVSLAIKELGEYYGVQLFDRIGRGITPTEAAKHLYGYAIHIVSLFNEMEQHIKNWDNIGTLRIGASITIGTHILPELIKEYQKHNPDLRLEVIVNKSSAIEQHILDNKIDIGLIENQSEHPDIILRPFMEDKLCAIVPPDSSLASKTSITLEELALHPFLMREKGSAGREILDAYFSLKDIHIHPLWESSSTQAIVRGVAMGLGVSVLPEMMIKKDILEHRVSYLSFPKPLKRNLNLILHRNKHLTKNMKSFIEYCMLYSEKMAKKILITGGAGYIGSHTALELLNEGYEVVVYDNLCNSSKESLKRVEELTGKHITFYEGDVMDEAALKEMFEKENVDAVIHCAALKAVGESVQKPLEYYRNNITGTLTLMDVMKQTGVKNIVFSSSATVYGSPEEMPITEECPKGQCTNPYGWTKSMMEQIMTDVQKANPDMNVILLRYFNPVGAHESGRIGEDPKGIPNNLMPYISQVAVGKLERLGVFGDDYDTPDGTGVRDYIHVVDLAKGHVKAINYIFSNPGLDVINLGTGVGYSVLDMVKAFSKACGKEIPYEIKPRRAGDIAMCYADPAKAARVLGWKAEKGLDEMCADSWRWQSQNPNGYEKMTYAKKKKLVSEIYFKDKKRKEFYACKDGRYKSYNPQFIAPSEKELVQKLYDYYFNNTLEDIYKQWVQHRAETQIVSQKTIEEDIGIWNRFIADTELARMQIAEIKPVHVMKLFQIWTGNGKITRKDFNNRKSVLNGIFRHAVLNEIITFSPITDLPCNTLKFKLPNASKKAYTVEERAMLLSYLKTLEQDAYTLAIQFAFYGIFRVGEIKGLTWDTENENIITIKQQLVEERTLQEDMTFSHPHRVLKDPKGNPFYSIRTEELPEAGINILRKMKELNPNGKLVFMHEGRPLTTDTFNRRLKKYCGELGITYLSSHKIRFTNASMLFDAGVKAIDIQPLLGHSNLAMTQHYIGQRTTERDSTEMARILAMMYRIEKVLNHNTVMAIHQDDHKEVLIMGKGVGFGRKVAERIEVRPEDRLYSLQKYKERGGAKEIVKSIAPEFLEVTNAVLDEAEKIFGKIDRMVLFPLADHIAFAVKRIQNHEQISNPLTEDIRVLFHMEFKAAESIRPLLQKQFGIDIEDDEVGYVALHIHSAIEDEKVSQAMQMARSVRECISMVEEAIGKPIDIASLSYNRLMNHIRYMVARALSGEKLKVNMNDYMEVKFPESFGMAQAVCDQVGESLGVKLEEVETGYLAMHIERVANDEREIEEMKDKIFGVLQRVGRSFMLPIAILPVAGLLLGLGSSFTNATTIATYGLQGILGEGTLLHSLLIIMNKVGSAIFDNLPLIFAVGVAIGMAKKEKEVAALSALIAYFVMHISINSMLEISGKIAADGTISKNVLEGTIASVCGINTLQMGVFGGIIVGLGVAALHNRFHKIVLPNALSFFGGSRFVPIISTITYMFVGIAMYFVWPIVQNGIYALGGLVTGTGYFGTLIFGIVKRALIPFGLHHVFYLPFWQTAVGGTMEVGGKLIQGGQNIFFAQLADSAHITHFSADATRYFSGEFIFMIFGLPGAALAMYRTAKPEKKKAAGGLLLSAALTCMLTGITEPLEFSFLFVAPVLFAVQVVLAGSAYMIAHILNIAVGLTFSGGFLDLLLFGILQGNAKTSWIRIIPVGIIYFFLYYFIFSFLIKKLDLKTPGREDDDEETKLYTKADVNARKAGNTEDGATAGSEDSLSAEITRGLGGSANIEDVDCCATRLRCTVSNPDLVNDGILKATGASGVVHRGQGVQVIYGPSVTVIKADLEDYLEHAPKELYEPQKDTESTGQNASEDATIEDKAGEKKVVDTIVISSPITGLAADLSTTPDEAFAGRMMGDGAVVTPEDAIVRAPEDGEVCFVFDTKHAIGFMTESGVSLLIHVGIDTVKLDGKGFECFVENGQAVKKGDPMLKLDLDYLRENAPSVASPVLCTELEDNQKIRLLNEGEIKAGDELFAIDIYEAMKNTNQEGLKYQKLYNWAHTLITSGVIKSMDKFPSETSLQKKFGYSRQTVRTALQQLEEEGLITRVRGSGTYVSYEGQLIDDNRPQVGLLLSYYSEYLFPEVYDGIESSLSEKGYRIGVAVTKNRLNDEAAYLEGMLKNNVSGLIIEGSRSAFPNPNIRLYEEIKKRNIPTIFIHNHYENMAFDSVETSDTRAAYELTRILIEHGHRKIGGILKYDDMQGIARYKGFIQCMSDYGIKYDDDCIRWYSTREMEDKFSKKGLAHIYRHTRECTALLIYNDEVAWVYLEFLEERGIHVPEDLSVVSFDDAELQDTTDIKLLSAIHPKNKLGRITGNHLLRMMDDENWQTKNYAYRFPAKLNDGNSVRKLMGSQVSAKTNDKEQQLKKASKMAMVRALLPIVGLVVIFLLFNVLTDFRMMGNMSLAFSQVYVTMIAAMGVFFIMTMGGLDFSQGSILGIASIVVCILSKHGIAIAILGGIASGVIIGAINGYFYVYRKIKSFIVTICTMFLFRGFIKYMTTNAPVSGSATLINYDSTGFKVACTVVVLVIGFIAFRYTKFGTYLKAIGAGEKAAMFSGIRTDRMKFLMYVLAGALTGFAAFINVIKVGSVTSSGGNQLETQILIALVLGGMPISGGAKVRFENIVVGSLLYVVLNSGLTMMGFSTQMMQLIQGVVFLIFVAVFADRESLTVIKMSEVRLQVKHVSKNFGITKALKDVSFNINKGEVHALIGENGSGKSTMTNMLTGIYTLESGQFILDGKEVHPKNQVEANEEGISIIVQELGTLSGLTVAENIFLGHEDQFVHLGIKNTAAMNKKANELLQSYGFDKIKAGDMIDDYNFEDRKLVEIVKATYFNPKIVVVDETTTALSQEGREELYKQMNRVRDNGNTVIFISHDLPEILDKSDTITILRDGVYIDTVKSADVNEDDLKKLMVGREVTGDYYRSDYGEKVSDEVVLSVKNVTVPGLIEDISFDLHKGEILGFGGLSESGMHEIGKAIFGASYDREGEVVLADGTHINDIPTAIKHSIAYTSKDRDNESVVLNQSIGDNICLPSLDELANKAHILSDKKRREFADKYAKQMSVKMNDVNQFVSNLSGGNKQKVVLARWIGKDSDIVVLDSPTRGIDIKVKQDIYQLMNQMRKNGKSIIMISEELMELIGMSDRIIIMKDGKISGELERNQNLDENGLISMMVMGTTKKLSGKTMGYVILIGLVIVSWVIFKILTPHNFGSFSNMLNYFQASLIATVGAVGFYFVMVMGMFDFSIGANIMLSAIVGCVLATKFNLGYFGLIVGGILTGTIVGLLNGIFYVKLRIPSMIVTTGLALIYESLANYMAGGVEQTLPAHLRAFGRMPWDIILALVACVVAYIFLNYTKIGTYTYAIGSDEFVAKNMGINVNKYKVLAFILSGAFLGVMAILTISYGSSMVAVTGMASMSRNFVPTMGCFFGLAFKKYGMPLQAIIIGEFVINIIFFGFIALGAPTAIQDVITGFALLIIVTLTTKVTKGEIVKMKRVLKKVTAALLAATMVVGLAACGSGNGGSGNKSSKSGKVKIGVSIWSSTDVLGSQCKKMLDAAAKALDVEVQYVDQGHVSEKVTASVEQLAAAGCQGIIICNSSDTEMTSAIKTCNDNKVYLAQFFRVISKEDSADIYKAAKDSAYYIGAVHEDEPANGAELVKILLDKGDRNIGLIGWEQGDATWLGRWKGYKAGVEKWNKENPDDKAKISEPQYAGTTSEGGSKAAEALMAADPKLDALIPAGGGGDPLQGAIAAVERAGKTQDIDIVSTDFLPDLGERLQNGSMAGESGGHFCDPLIAFMMVYNAVKGNYKDFAGKFEDVPFPYLYVSSADDYAAYEKYFVDQLPYTDDELVAMSKESLKELKATAASVSIADAESRAGKMKVVLLSKENMKKKPKSAQKIRFLFTIIAAKTVKTHKKIEKHTMEDTKTCLEKQPLSQEMLEKMNAYWRAANYLSAGQLYLLDNPLLKEPLTMDQIKKKIVGHWGTVPGQNFIYVHCNREIKRYDLDMILLSGPGHGGNFLIANTYLEGSYSEVYPNISQDEEGMKKMFKQFSFPCGVPSHCAPETPGSINEGGELGYSIAHAFGAVFDNPDLIATVVVGDGEAETGPLATSWQSNKFLNPVTDGAVLPILHLNGYKISNPTIFSRISHEEVENFFKGCGWKPYFVEGDDPMTMHKKMAETMDTVIEEIKAIQKNARENNDPERPVWPMIVLRTPKGWTGPKVVDGQQIEGSFRAHQVPLTMESPEHLELLKEWLESYHPEELFDENGHLIPELAELAPKGDARLGANPHANGGLLLKDLRLPDFRSYGIEVEPGKTKAQDMIELGGYIRDIFELNEENKNFRIFGPDESMSNRLYKVFETQNRDWNAGLLDTDDCLARNGRIMDGMLSEHMCEGWLEGYLLTGRHGFFASYEAFIRIVDSMAAQHAKWLKVCNQLSWRQPIASLNFILTSNVWQQDHNGFTHQDPGFLDHIANKKADVVRMYLPPDANCLLSCFDHCIKSKNYVNAIVASKHPSCQWLSMEQAVKHCTQGIGIWDWASNDCGEEPDVVMACCGDTPTLETMAAVTILRDEMPELKIRVVNVVDLFKMESDHKHPHGLSDAEYDAIFTKDKPIIFAFHGYPTLIHELTYERNNHNISVHGYQEEGTITTPFDMRVQNQIDRFNLVKDAIMHLPQLGNKGSFLIQKMNDKLVEHKQYIAEYGQDLEEIRNWEWHKMNSNFEYYKIFYYVAKYENLTKAATVLKTSQPAVTRTIHKLENELGCRLFTRSKTGMQLTPEGRTFYGYVAAGCAQFFKGENDLSNLISLENGTIYISATETALHCYLFQAMEEFNSLYPNVRFKILNNSTTESVNAVKEGKVDLAFVSANLQVAKPLRMKILRKYHDILISGNRFGELKDDGKEVSLKELVSYPWISLTAETITRRFLNEYFEKNSLTFTPDMELATTDMILPAVRHNLGLGFIPAEFADSELKSGQVFEIKVKEKLPERNIILIYDKEYPQSIAAKEFQKFLKEKEMMKKKTSKLSWFGTGAFTIIGIVYIMPILIVLINSFKNKVFINKEPFKLPTKQTWVGIDNFLSAIDKYELLSAVGWTVFITVGSVLVILVCTSMCAWYITRVNSKFTKLLYLLCVFSMVVPFQMVMFTLSLVADRTGLRTPWGIIIIYLGFGAGLAVFMFCGFVKSIPLEIEEAAMIDGCTPLRTFFSVVLPIMKPTYISVGILETMWIWNDFLLPYLVLDLNKYKTISIAIQYMKGSYGRVDMGAVMAALILAVIPVVIFYLACQKHIIKGVAAGAVKGMEKSIKRYMPIFVLPTFFAFILGFIVPFIMGIWLSFCKFTTVTDAKFVGFSNYIEALKDTAFRHSFWYTVLFAIASLLIINIIAFALAMALTKEMHGTNVFRTVFFMPNLIGGIVLGYIWQLIFNGVLSRYGTALALNEWYGFWGLIILVSWQQIGYMMIIYIAGLQSIPGDIIEAAEIDGANKIQTLFKVTIPMMMPSITICMFLSITNGFKLFDQNLSLTAGEPSKMSEMMALNIFNTFYGRTGWEGVGQAKAVIFFAIVVVIGMIQLRATRSKEVQQMKMRKVVSAMLVAAMATGMVAGCGSSSDSKSDKKDAKGKVYYLNFKPEQDEQWQDLAKEYTKETGVDVTVLTAASGEYEKTLKSEMAKSNAPTLFQVNGPVGLASWKDYCYDLKDSDVAKQLTSDDFALMDGDKMSGIAYVIESYGIIYNKELLKKAGYSADDITNFDSFKKVVEDITANKDKLGFSAFTSAGMDGSSDWRFKTHLANLPIYYEYKDEGIDNTDAIKGTYLDNYRQIWDLYINNATCKPTELSTKTADDATADFVTGDAVFYQNGTWEYNNIKDVGDDNLGILPIYIGVEGEEDQGICTGTENYWCVNSKASEDDIQATLDFMNWCVTSDDGVKAMCKDMGFTIPFKKNLKSDNVLVNEANKYTEDGKTPVSWNFSTMPSEEWKNGVGSALTSYAADPTDANWAKVTTAFVDGWAKEAAAAKMFFCISGCFIDTGFERISVNIMTTRETKVSKKKGEGNELMAAVMVIVMLAALTGCVGKEDTQTRKKNKVVEIPMILTVDSSTGNKNEEEVVERFNRAYKGKYHIDVDWVMETEEEYRKNLKRMNVTDELPAIITDLRMLPSFYQMMIKKGRIEDLTPYINEDQEWKDMIEPSVMESVREEDGKIYLGPVSTAAFACSGVFWNRELFEQAGISRFPETWEEFWKCCEKLKAAGITPLALHTEGTAWAAMLLATAEVAGSEEGAAFMKQLYPDTYQNEPGLEIAGTLKKLFQYTTQDALHNDFDVAYDNFVAGNAAMIPNGYWMIDKIPEEMQKKVCFSTFPENKLIGSPETFGWAVVSTYSEKVKKGAVEFLKFRTKLNKEQKEELLNSRTRQEGTLLDDYLKAYTGNPQIVPNYQVKWNSLLQENVLGECLAELVQGKITEQEFTQAEDESIRQFEEEQMKKSKMSGIQKKYLKYMCTLLILALVLSSICVWTYVRRNMTDVIVDKYEFMNEKMGIALDNLYRKTDAVTAEIILENDVQKSLRNKELQEVEKNALSKYFAYIDLNHVADYCYIDNKRNVYEKSYSQIGYSDFQSSGLREKMGDEYAKTQWIWTRDYLFGTGDEALFIGRYVNSMDYAHEPGIVYLKMNQQFLESVMDKDRKIAKDVAVGIISPEGKTCIRQEPEDLSIEKRTMKKITELTRTKKSGVIVRGKKIEGGILQAYRQEETGMVIFTLVPDMVLNQGMTQILIVLLTIYAVIAVLAFVLSLYASQTFTRPIRQISDAMTSFDGNDFTHTIQIHTDTELDKIGHAYNEMLKNIEEFQNEVKNQQKELRISEMNTLISQINPHFLYNTLDTIYMLARINGEEKTMKMIQALSKYLRLSLSKGREIVTVEDELENVKSYMEIQQIRNENLFRYEIECAEELKTRWILKLILQPIVENAVKYGFCDIFEGGLIRISVTEQAGQLTFSVYNNGTPMEEQMAEKLNGLSEIPVSKMKDSFEDKKHGYGVINIITRLRLKYGEDVRFFYESDTNGTVCVIQIPDDGKENSEQMGLLKLVIVDDEPILLEGLVKTYDWNGMGYEVVGFAQSGEQALKVIREKKPHVVLTDIRMKQISGLMVMEEIKKENPECQFVVLSAYRDFEYAKKACDLGAFAYLLKPIEDEKLQATMTDVGKICEDQIRNEEKYDRWERLLKKDGDGFLQVVVQKYVQNRLPEEKVDEVFHTLQDVMKEGDRFITVYADLDLAYKITNELEYEASRFSMVRMIEEKIAERFTYWKFESEEGHRTFIVKTQENTAVHELKELLEEVKKEENSPVIAAISKPYKGIRGIRRSFEEAQRLFAVTNASGAGVFTIPETVEEKEESPYPAEAEMMVVNSVRKNDAVQLKQAFVHFIYQLPHREELQCQYMHKIMVKTEFMLKDSYGMDESLNQQFENYYSNMRNLKAAKAVDVCYKILGTAIEKRLENAEKKENKGSKEYIAAAVAYIDEHLDNEDLSIVSVATHVYLNPVYFGRVFKNTFHMTFKQYLLQRRMELAKRLLEDGRTSIGNICEQVGISNPSYFSHLFKEYTGQLPRDYKREYEVMRKSGMLMPVSALPGAYGIGCFSKEAYEFVDILKEAGQKLWQILPLGQTGYGDSPYQSFSTFAGNPYFIDLETLIEDELLTKEECDQADFGENEEEIDYEKIYNARFKVLKLAYARAKKNGLMESKAYRTYLEEEKAWLADYALYMAVKDSFDGKSWDQWEEDIRLRKPEAIAAYQEQLSAEIDFYEFLQYLFAGQWAGLKTYANEQGIEIIGDIPIYVAFDSADTWANPKLFQLDEENLPVAVAGCPPDAFSATGQLWGNPLYAWDYHKKTGYDWWMKRVACCFKLYDIIRIDHFRGFDEYYAIPYGDETAENGEWMPGPGMDLFRTMKETLGDLPIIAEDLGFLTDTVRQLLKDSGYPGMKVLEFAFVAGEDSDYLPHNYDKNCVVYTGTHDNDTLQGWYQTLSEEDKEMTKEYLNNPYTPDEEVHWDFISLAMRSVADTCIIPVQDYLGLGNKARINMPSTLGGNWMWRMKKGAFTDELIKKIRKTTEVCARMIQYIVTGMSCAACSARVEKAVSKVPGVTSCSVSLLTNSMGVEGTATEQEIIKAVKDAGYGASKKGEGAAKVQPAQALAGEDMLKDRETPVLKRRLIASVGFLIVLMYFSMGHMMWGWPVPGFMKDNHVMMGLLQMLLTITVMVINQKFFISGFKGLIHRAPNMDTLVALGSGASFVYSTYALFAMTDAQMHGDMDAVMSYMHDFYFESAAMILALITVGKMLEARSKGKTTDALKGLMKLAPKTAVVIRGEKEVQVSIEQVQKGDCFVVKPGENIPVDGEVIEGNSAVNESALTGESIPVDKAVGDKVSAATVNQSGYLKCRATRVGEDTTLSQIIQMVSDAAATKAPIAKIADRVSGVFVPMVITIAVLTIIVWLIAGQSIGFALSRGIAVLVISCPCALGLATPVAIMVGNGMGARNGIMFKTAVSLEETGKMQIVALDKTGTITSGEPKVTDIIPAAGVTEDTLLKCAYALENKSEHPLARAILENAKEENAGIEEVTGFQALPGNGLTAILDDHTLYGGNHTFISSKVSVDGDIQKKAEKLAEAGKTPLFFGNEDRLLGVIAVADVIKEDSPQAIKELQNMGIHVVMLTGDNERTAKAIGQQAGVDEVIAGVLPEGKEQVIRKLKEKGKVAMVGDGINDAPALTRADMGIAIGAGTDVAIDAADVVLMKSRLSDVPAAIRMSRATLRNIHENLFWAFFYNIIGIPLAAGVWYPLFGWKLNPMFGAAAMSLSSFCVVSNALRLNLFKMYDASKDKKLKAKKEKKRSKKEDKTMKKIMHIEGMMCGHCEAAVKKALEALPQVDEAVVSHESGTAELTLNAEIADDVLKKTVEDKDYTVTSVEMEDKNTDNMENKSEKGCCCHTSKHRSEKEYKDLMNRLSRIEGQVRGIKGMLEKDAYCPEILVQVSAVNAALNSFNKVLLANHIRTCVADDIREGKDETVDELVKVLQKLMRMLEEQAMITFLKKFDEHPFLVKINGHEHLIGEGAPTFTVNFKKVIPLKDLVTSTSLALGEAYMDGDLDIEGNLYQALDNLLGQMGKFSTDEHHLKSIMFPSSSKKNQKKEVSSHYDIGNDFYKLWLDETMSYSCGYFKHEDDTLYQAQKNKVDYILEKLYLKEGMTLLDIGCGWGFLLIEAAKKYKIKGTGITLSEEQYKECQKRIKEEGLSDYLEVRLMDYRDLPSDGKMYDRVVSVGMLEHVGRENYQLYLDCVSKVMKDGGLFLLHFISALKEHPGDPWIKKYIFPGGSVPSLREVMNCMAEDNFHTQDIEDLRLHYNRTLLCWEKNFKDHIEEAHTMFDERFLRMWDMYLSACAATFHNGIIDIHQILMTKGINNDLPMTRWYMTIDAIIMMVITLVGYIGGFSYFMIRVFKKERSKSKEMEQKQEKFSTIGYIAAALGMCIGTGNVWRFPRVCAANGGGAFIIAWTIAMLVFAVPLLSTEMAFGKKTRLGCIGTFRDAGGKKYTWMGFFVAAVCFFLMSYYCVLQGYCLKYAVNSVTSAFKPNLSTETTSAMWTAFTDSQAQVILFHAIGFALACFIVYQGIAGGIEKFCKVAIPALFIILVGLAIYAVTLNGANQGLQYLFTVKKEYILSPNTWIQAFIQAAWSTGAGWGFIITYANYVGEEEDVPTSCLIMGLGDNLGAILSALVVIPAICALSATPEAANEALSQGNFGLTFIYIYQLFTTIPGGRFISFIFFGLLAIAAITSLFSMIEVGVKCVVDLGLPRKKAVVSVCFAGFLVGCFSCWSLVNIDNQDWVWGIGLLISGAFIAILAWKYGVEKLRTQEVNAKGADVHLPKAYYTGCMYLIPVLVVIMVVYWLLQTKEWFPDTWLNPFIIQDNTGTVLLQFGVVILVGLALSKFFNTKTARGAMKDNKAAKMKEYKELKLKKKIYSIMNCYEKAGNLYQMIESLIQVFVYHHVFERSCRWQVLMAKLEEGMEVCESCEVHENLLKIVNEKMPEETELYDLAELFKVFGDSTRMRILFVLFEAEVCVCDLAEALNMTQSAISHQLRILKQNKLVKSRREGKSVFYSLADDHVRTIVDQGREHIEEDLMTKRQKKSLTRIIIAAVLMIILKFLPVEGWLKFVLYMVPYLVVGYDILRKAFKGILNKQVFDENFLMAVATIGAIALGNYKEGVSVMLFYQIGELFQSYAVGKSRRNISDLMDIRPDYANIEKDGELEQVDPDEVEVGTIIVVQPGEKVPIDGVIEEGSSTLNTSALTGESVPREAAAGDEVISGCINLTGLLKIRTTKEFGESTVSKILDLVENSSSKKSRSENFISKFARYYTPAVCYGALALAILPPLVRMFAFALAPEWGDWIYRALTFLVISCPCALVISIPLSFFAGIGGASHEGVLVKGSNYLETMAQTKYVVFDKTGTMTQGVFEVNGVHHNTMPEEQLLEYAALAECSSSHPISKSLQKAYGKQINRDRVTEIEELSGKGVTAKVDGIPVAAGNAKLMKYLNVEYSECEEVGTIVHVAVNGKYAGHILISDKLKPHAKEAIRDLKKAGITKTVMLTGDMKRVADKVAEELGIGEVYSELLPADKVAKVEQLLSQKSEKEKLAFVGDGINDAPVLSRADIGIAMGALGSDAAIEAADVVLMDDDPKKIVKAIKISRKCMRIVYENIYFALGIKAICLVLGALGIANMWMAIFADVGVMVIAVLNAIRALFVKNLMKKTYKIDVDCANCANKMEQAAKNTDGVKDATVNFMMLKMIVEFEEGADPKKVMKDVQKNCKVVEDDCEIFLMRSHRFTKPYNLKNYKFGIVTLVGILSVLGILVVGSAKESLQSKQILGMLKNSSVSIAKNRLRTLVISDRVQCTPSAYEHICKDLYETLSKYMELTEDDFQVEINRSQIVIKIAGEETMGEVIVITSGKGGVGKTTTTANIGAGLSKLGKKVVIIDTDLGLRNLDVVMGMENLVVYNLVDVVEGSCRLKQALIRDSRYENLYLLPSAQTKDKSAVSPGQMKKLTAELKEEFDYILLDCPAGIEQGFQNAIAGADRALVVTTPEVSSIRDADRIIGLLEQNQIHTIDLIINRIRMDMVKRGDMMSVDDVTEILAVPLIGILPDDEQVVIGTNQGEPVIGLDSKAGKGYLNICKRITGTEVSFMNLDTGKGLFSRISHAFRKNMKDDVLIKSNKYGITIYFNSDNSFEELLDDVKNKFQSAAKFFNHAKMAVEYEGRSFTEEEERQLTRAIESAAGIEILCIIEKNTATEQVHKKLLDESLEAIHERDGQFYKGTLRGRQVLESEQSIVIIGDVEEGATVASKGNVIVTGTIYGTVIAGAAGRTDAVIAALHMQPKKLRIGGIKVKPVIGGSYSWAKLLELAGVLLAKIQNSLDFDRNKVEDGSDVIIPIGDVYNAMINNDVLDMTHFTDPDAGEAEKEVASAFSIRKEEVKNTLTKVLNDSKAAAYKNQPKEVQAYLTYLVSDVLTNGTGVLMSKSIDTKDATYKAWKDEESINVYTYLNYAISKNWIDTSLLKDYIKSNEQYSDSGEVYQGIINYILDYINTDNNFDKLIYRYMIKSGTITGRQICMMLYEQNILDKKDNQYDSLKAGSIGAYDFIRSKIQSLEITPGQLGLEPCTGSLVATDPNTGEVLACVSYPGYDNNRLANTMDSDYYSKLLTNQSRPFYNNATQEKTAPGSTYKPLSAITGLTEGVIDVNTYLPCAGVYKKVTPNPKCWIYPSAHGNLNVSQGIQHSCNDFFYEVGYRLGLNSTGDSKLDNDTSDGKSTQNYYSSERGIAKLQKYAEEFGLGDTSGMEIPESDPQISDDNSVLSAIGQGTNNYTTSQLARYITAVANKGTVYNLSLLDKVTNPKGKTVKDYTPEVKNKVTDVSSTTWQAVHEGMRAVVTSEHKDIFTKLNASGVQLSGKTGTAQQSQTHPDHGLFVGFAPSDSPQIAFAIRIANGYSSTFAAEVGNNVMEYYYKVTPENELITGEASNIGIGSNGGDMIWNKKPKQKNQQNGNQLIQNNEGRYEKSCRLFLSAKRRLIAATIQFFDLFSGIGGFREGLRRAGNFVCVGHCEVDTYADKNYRLLFDTEGEWYCNDARTIEPERMPDFDLLCAGFPCQAFSIAGKREGFADARGTLFFEIARILEAKRPSYFILENVPGLLSHDKGRTFCTILSTLSELGYHVEWKVLNSKDFGVPQARKRVYIVGYFDFRCAGKVLPEPETNGAALVQVRAGSQGKRVYSPKGLSCTLTSQAGGMGGKTGLYDVGVPIKENTKLGYKLAREGDSIDLGYANLNSRRGRVGHQIAHTLTTGIQQGTLHFVDLSPPPLVTEECRSLNTRQCGIHKYKGECSGVLREEGARAVLTPAKENVRQNGRRMKEPEEPMFTITATDRHGILYHGRIRRLVPRECLRLQGYYMTRPVYSFRPNLKNPEHQRAWEKFQSVPEGQKSQYLVQAILEKEDRKWLEEVIQKTIKESVRELGICGTMEQSTTNPSSEEIPDQMMDFLSQMENLAVPTVFMGGGSAILKRHVTAQDAICRSVFIEDVYANATGYERIVEQMWARMIGIKDQYFGTEIEMTGITRQRAAEVVAEMFGTEAYYDGAQLYKQAGNGVTVNVIEAIGRLLQKADSELNAQEVSEKGIHMYLLEGKPVPDHATFARFRSIHFAPCAKRILAEMSGLLYELGEISGETIFIDGTKIEACANEYTFVWKKSVSKNQEKLLMKIADFIDECEQLYGIQIVHGDTVKMKHVKRLRRKLYALKQEENIDFVHGIGKRKSPLQKSIETLESYLDRLKGYTKKLHICGKRNSYSKTDPDATFMRMKEDAMGNGQLKPAFNLHHGVDSEYITWLTISPQPTDTTTLIPFFKEAETYLSFKYKKIIADAGYKSEENYVYLEKNGQVAFIKPSNYEKSKTRKYKKDIGRIENMNYDEVKDCYTCKNGKQLLSTYVRRSKSKTGYISEKTIYQCSECKDCPYKRDCIKGNNCKTPMEERHKVLSVAKTFLKYRKEDLERILSDEGIHLRTNRSIQVEGSFGELKQDMQFRRYLSRGTSNVLAESILLAMAKNVNKLHNKIQKGKTGKHLFPLKTAMNYIITVDGGTSNTRTYLWTANGQILTQRSQAIGAKTSAINGSNQAWKKAIHNMIESMLTECAVSDNAVQGVYMSGMLTSDLGILEVPHLTAPVSMKNYQEHLVRVHLPEVFSKEIVLIPGIKNTLSNPESLDSLRTFDIMRGEETETYALIEQYGSDQNTIYILPGSHNKYVFIDENCTVLATSTTLSGELLNSIVNDTIVASSVDHGFPSMEHYNLEMIQYGCEMHRKEGFGRALFLTRLFDRFGSQSKYNLQNYVLGIVLESDLTALHNAAFFKDVTNVRIVIHGNGAFSHALYDLLKEDPAFHNIVLDDSEEIPIAAQGAFHLAMKDLQTHMNYVSILNQLLENKIIAILRLDSPQKAQKGIEALKKGGIQAIEVTLNTPGALQVISHYQNVSDLLIGAGTVLDEASCLNAIQHGAQYIVTPTLNEGVIKCANRYQKPVICGCMTPTEIMTALELGVNMIKLFPASILGLDSIKAIKAPIPQALIGPTGGVNLENITLWQKSGADFYGIAGEFSKLANEEKYSELTEIAHRYCTAISHQTLMQEEKMHRSTYRVLKIFELLSATSEGMSLTGLAQKLEIPKGSLHPILKTMQAMNFIRMNDNGNYTIGQAAYFVGSSYTKNSDLLQEIDYVLKNLSSAVNQTAYFSVLSGGEVLYLLEERVATPITIQAKRGYKYPAYATGIGKALLSGKTEKDIKTLYPEGLYKLTEHTIDDFDTLFSQMEETQKSGYSFEKEESNKDVQCIAVPVKYKENVIAGMSVAVPVFYYSEEFEKKAMEELKKAKQHIEKLIQDNTQEWVYSPLGTETMKQKNGMPLAQAAAEDIIEMIRTNHMKPGDRLENEYELAKKLNVGRSTVREAVKSLETRNILTIKRGAGTFISQNEGVAVDPLGISLMGKDEGIALELLDVRMILEPESAALAAIHADKNEIAEISRQNRKVIGMIRQGLDHHEEDARFHQLIAEATKNRIIAKLVPIIQQSVGLTAEMTSKRLTETTVSFHEQIVEAITRGDANGARSAMIAHISENRIYIIKEIERKRRFEMKALVYAGPKQVEVQEVKEPEKQDGKVKLNIRYCGVCGSDIGIYLGTHPRAKAPLILGHEFLGIVAEDGKKFKKGDRVVPYPLLSCGHCLACRSGNEHVCNTLGLIGIDTDGGMCQTVYTDEDVLFKVPDGVSDKAAAVIEPLAVLVHAIHMSGFEALDTAVVVGAGPIGMLCGIMLKHAGASKIFISDVVEKRLEIAEELGFIPVNPEKENLEKVVKDATNGEGCDAFFECSGAAVPAMQMTDITRVRGKICIVSVHKKPHEVNLREVNFKEQTVVGTRVYTKEEFGRAAELTKELETELEKIVTHVVPLKESDKVFDMIADPECGTIKIVVDCENVMSSKTKSVTAVLIVLALVAGVGMTKVGSKYKTQDKVNLIFANATSNSAKKAGEKFKELVEEYSDGDITVDLFPDNQLGDDKTVAEGVQNGDIDIGISSSGNLSTLYKDYYIYDTPYLFLNSQEVYDVGFDGKAAQEMLKGVSKVGLKHMAMWENGFRNCTNNDHAIETPADCKGQKIRTMENPIHLKAWKSIGANPTPMAFSELFTAMQQGTVDGEENPIGIIYSNRFYEVQKYISLTQHVYTPYVVFMNPDKYDSLTDEQQEIIDKAMKEASAYQLEVSAKDEEEGLKEMEKYGCEVNTLTDDQKKEFQKLIEDADVFSLAKSSMEHPEYFDEIQKELTQYREEGKMKKILKFLNDYLEETICIILMSVMTIIIFIQVIMRYVMHNSLSWSEELARYCFIWLIYIGVAYGCKLMKHIKIDAALKLFPEKVRPYITIVGELLVLAFAAYIVVTGVELTYKQWLFGKASPALGVPLQYINAAPVVGFGLVVIRQIQTIWYLAGKLPEKNGGEKMVAAVLFIALVVTLVLNTPVGIAIGVSSLCAILADGRISSLYIVQQLVTSADSFPLMAIPLFILAGELMGAGGVSKRLLNVCNVFLGRFTGGLATVTIVLCMFFAAVSGSGPATVAAIGSMVIPTMLDKGYSKSFTLALIATAGSIGVIIPPSIPMVIYGVSTSTSISSLFMAGFLPGILIGFSLIVVSYLYCKKQGWKGDERKYTAKEKLAAIWDAKWALLNPIIILGGIYAGIFTPTEAAAVAAVYAFICGAFIYREFNIKEMFATIGNACNTTGTTMVIIGCATAFTKILTIEKIPGAITNGIINFTDNKILILLLINVLLLIVGCFMDTTPAMMVLAPILLPIAAQFGVDPIHFGIVMVVNLAIGFITPPLGINLFVASRVGRSDLETVCSGIIKFILVMVVDLLLITFIPAISMTLPNIFMKMSIFDLTGKKAIVTGGSRGLGHGMAEGLMEAGCEVVIIGTRESIKDRAAEFNQKGLKCTGVQADLGDEIALKEAFRESLAALGGHLDILVTAHGVQSRHPSEEFPMEDWKRVLDVNLTAVFELCQLAAKQFMAQESKGKIITVASMLSFFGGYTVPAYAASKGGVAQITKAFCNEWAEKGINVNSIAPGYMATEMNTALLDPKNPRKEAITNRIPAKRWGTAEDMKGPCVFLASDASDYLNGAVIPVDGGYLVRMKVIITDCDHDSIDIEKKVFADAGMEVELKQAITEDEVIEQCQDAEIFIVQYAKITKKVMDNCPKLKYVVRYGVGVDTIDVPEATKHGIQVGNVPDYGMNEVADHAIALAMVMVREVVKMNQFTKNEKWDYTKAIPIHRFSELTVGVVGLGRIGRNFAKKMHALGFKVIGTDPYFKATPETDEYVTAVSVEDIITKSDIISLHCPADGNKDLFNAETFKKMKNSAVLINVARGGIINEADLDEALSNGEIAGAGLDCMLGEPVSKDSPLFKHENLVVTPHMAWYSEEAASELKRKVAEESVRFSNGEAIHYPINKLAMIEELLKQIECMGILPVIKLNDAKDAVPLAKALCEGGLPCAEVTFRTDAAKESIAVMTKAYPEMLVGAGTVLNTEQVDEAVEAGAKFIVSPGLNPDTVEYCVKKGIPILPGCSSPSDIEQAIKYGLDVVKFFPAEAAGGLKAIKAMAAPYSQIRFMPTGGINPSNVSDYLAEDKILACGGTWMVPAAEIEAGNFDKIRELTEEAVRSMLGFRLAHVGINCENESEAHLVAGAFDTMFGFAPNENPSSIFSAGYVETMKTPYLGSKGHIAIATYSVELAKAYLERKGVKFNENSTVYRPDGKIQAIYMAEEVGGFAIHLVRKPKEAMGKTILFGEPMALLIADTTGPLEEVEHFTRAMSGAEVNVSIGLSRLGHPVEYLTRLGDDPFGHYIANALKKNEIGTSLVTYDDVYRTGIQLKNRVTDGSDPYAPYYRKGSAASHITISEIDAIDLTDVELVHVTGIPPALSQSARKATFRLMDRAKEAGIFITFDPNLRPVLWEDEETMCTVLNQLAAKADVVLPGIGECKILAGTEDKKEAADFYQKLGVKTVIIKDGSKGAYVQTADENYDVAGYKVEKVVDTVGAGDGFAVGVLSGILEGLDLKDSVKRGNAIGAIQVMNIGDNEGLPTPKELKAFQENNMEILKVTDAEFKTYGKVLEGYDMTDLLKAMEHAPLPLDEVIYEPSIEELEGLKIADEMKERAYGGLEIQIGYCNGNNKKLNAVEYHRSSELDIAVDDLILLLGCCTSERYEYRTDRSAEKDNMQKKTIEEAKKAEGKMPEDGLLTAKNKWLIAHEEAEIEGAFNGLCGVNVTVMNNMPEVKIGVVAVSRDCFPESLSVNRRKNLMKAYTEKYGTEGIYECPICIVESEIHMVQALEDIKKAGCNALCVYLGNFGPEISETLLAKHFDGPKMFVAAAEESGDNLLDGRGDAYCGMLNASYNLQLRNIKAYIPEYPVGDAKECADMIHEFLPIARAVVGLQNLKIISFGPRPMNFLACNAPIKQLYNIGVEIEENSELDLFEAFNKHAGDERIPAIVKEMEEELGAGNKKPEILPKLAQYEITLKDWVEEHKGYRKYVALTSKCWPAFQTQFGFVPCYVNSRLTAQGIPVSCEVDIYGTLSEFIGTVVSQDTVTLLDINNSVPKDMYKNDIEGKYNYTQKDTFMGFHCGNTASSKLSFCEMKYQKIMARTLPEEVTQGTLEGDIVPGDITFYRLQSTADNKLRAYVAQGEVLPVATRSFGAIGVFAIPEMGRFYRHVLVEKGFPHHGAVAFGHFGKELFEVFKYIGVPVDEIGYNQPAGVKYPTENPWGMLYIGVDLGTSAVKLLVMDETGDIKKIVSKEYPLFFPHPGWSEQKPEDWFEKSMEGIKELTAECDKSQVAGISFGGQMHGLVALDKDDNVIRPAILWNDGRTGEETEYLNEVIGKDKLSEYTANIAFAGFTAPKILWMKKHEPENFEKIAKIMLPKDYLAYKLSGSFCTDVSDASGMLLMDVKNRCWSKEMMDICGITEDKLPKLYESYEVVGTLKKEIADELGFSENVKVIAGAGDNAAAAVGTGTVGDGMCNISLGTSGTIFISSNKFGVDENNALHSFAHADGHYHLMGCMLSAASCNKWWNEEILKTKDFAAEQAGITNLGENRVFYLPYLMGERSPHNNPDARAMFIGMSMDTTREDMTQAVLEGVAFGLRDSLEVARSLGIKIERTKICGGGAKSPLWKKMIANIMNLKVDVVENEEGPALGGAMLAAVGCGEYPDVETAAEKIVKVVDTVEPDEELTAKYEERYQRFRKIYPTVKCLYEKMESHKIIQVEEKVPLKLLLPLSIQHMFAMFGASVLVPFIFGINPAIVLFMNGVGTLIFIAVTKAKSPAYLGSSFAFLAPAGVVISKMGYPYALGGFVAVGLCGCILSFIIYKCGTKWIDIVLPPAAMGPVVALIGLELSGSAASNAGLLDDKIDPKNVIVFAVTLGVAVFGNILFRGFLSVIPILIAVIAGYLTALACGILDFTQVVEASWFAIPNFQAPKFDMGAILMILPVLLVITSEHIGHQVVTSKIIGRDLLTDPGLHRSLFGDNFSTMVSGLIGSVPTTTYGENIGVMAVTKVYSVRVIGGAAILSIICSFVGKLSMMIQTIPGPVIGGISFLLYGMIGASGLRILVDSRVDYGRSRNLMLTSIVFVTGLSGISVNIGTVSLTGMVLACVVAMALSLIFYILDKLKLTNDREVMNQSLTLPMADKFYHDKQTSAFIRSLNVSWEKPEKDHYYLEYSYNQKDWYALNGGFPIVLPCDELSVTDALETQDPNGETISVAALSSLQNKYGKPEPVCIQSVERCESDPETVQVTYTNGMKEIRNIIRSEDGIGHIQDNDYAAPIISHRADPYIYKHTDGKYYFLGSHTDAGHNLNGTYQYLYIILRCADTLEDLTDNSGRYTEKVIYEREPIGPDRVSPHLWAPEIHYIQGGWYVYYTTTVSDHSSWRIRPHCLACTGDDPMNDPWITKGPIQTTVENDIAFTDFSLDHTFFHHKGEDYFVWAQKTNNISDIFIAKLSNPWTICTPSVLLTHPEYNWELHGFAVNEGPAVIKHGGRIFLTFSASGTDALYNMGLLYADEDSDLLDSSSWTKLPYPVFQSSRATGFFGPGHNSFTRSTDDTEYLMVYHARQEERYLGEGDYQPLYDAGRNAYIGKVFWDEDGMPNFSVPGASLAMRKEDLTLPDHWMVTIKEIAKECNVSVATVSNILNHKPGASDETRRIVMAKIKELNYKPNTVARNLKTKNTRTIGVIVEDMTIFSIPDIVDGITEHCEENNYQILLINLRLFKKYNDFYYHRDDYYDRVEQEIDKLIARQVEGVIYVAAHERVMKCIPEKLPVPAVMAYGYTQNKNIPSIVVNDEDGAHQIVKHLVDNGHRKIGIITGKPDSIHTQERLLGMQRAFYENQILYNPESVYYGDWTRQSGYNGTDQLLEQGVTAICCMNDLMAGGVYDRMEERGMLPGKEVSVTGYDNRELSGYYKPPLTTISLPLHDIGYTASEVIMRMVEEKELKEPDGIYRVGCHMLERSSVRNLKENSMDGKKLKTVPLNKIKISDQFWNRYIHLVKDVLIPYQWDILNDRLPDVETSHCIENFKIAAGETDGDFEGAVFQDTDVAKWLEAVAYSLAAEPDEHLSYLADKTINLIGRAQCEDGYLNTYFTIKDPSKRWTNLKEGHELYTAGHMTEAAVAYYKATGKTEFLDIMKKFADLICKTFGPDEGQIHGYPGHQEIELALIRLYHITGEKKYLETAKYFIDTRGVGENYFLEEEKRPEYKQIFPEFAGYDPRYSQSHEPVREQKTAEGHAVRAVYMYCAMADLAYEYKDKELLDACKTLWEDMTKRQMYITGSIGASGLLERFTTDYDLPNNCNYSETCASIGLALFGRRMAQITKDASYMDVVERALYNTLLSGIAQDGKSFFYVNPLEVWPDNCIDRTSKEHVKPVRQKWFGVACCPPNIARTLASMGQYIYFTDKNTAYVNLYISNEAQIELEEGSLKIQIESDLTNTGHIRMAITPDGEDEHRLALRIPDYVKTYTIKRDGKILENARISQSYLLIEDIKEQTEIEIDFEVPAKFVRANPNVREDAGKVALVKGPLVYCLEETDNGENLPSIFVNTKQELKETFESELLGGVTTIRFTGKKLNMDTWQDGALYDIREQVFEDIELKAIPYHCWDNRKTGEMLVWMKEMFMKKKVVSVLLCVAMTATMLLGCSAGSEKSDSKKSSKSESGGTTEMKVDGDATTINVWTFIELHQKFYTEMAKKWNEAHPDKKVKLVLSNMQYDDMHNKLSLALESGKGAPDVVDIELGKFPSFTNGKIGLMDLTDAIAPYKDNIVESRLDIYGKDGKYYGFPTHVGTTVAFYNDDLLKEAGIDYTTIKTWDDFKAAGVKYHEKTGKNFACAETTAQWMVNLMLAQKGTDYLDKDGNLDLTNDKVVEVLQYIKDMQDAGALATVAGGQPDNEEAYPEYNSGNFAVQIMPFWQTSRFTNYMSDLEGKIAIAAPPVFGDNDAVKTIGGGGTGTAVVKSSKNADLAAEVFAYIKLSEDANKEVWNVLGFDPVNTSVWTDTDLTQNPDNQFVKYFKTKPFDTLLELQDSIGGLNSYTSSKYPSINNEFCTTTLNNIFEEGMDVKDALKQSQETLENEFGSKMKKFFYSQKLAPYVFILPFVLTVIFFWAVPIANGVLLSFQDVLQDKWVGLDNYKRLLSDKIFLKALFNSTRYMIGTLVLLIPFPMLFATLLNSKLMKKPGFFKSIYFLPALTSVVVAGTIFRLMFGEMETSLANQVIGMFGLGPIKWLKNDLTGYFALLLLACWRWTGVNILYFLAGLQSISTDLYEAASIDGANKWQQFTKISLPLLKPTTVYVLTISIYAGLAMFNESYMLWKGNNSPQNIGLTIVGYLYRQGIEKRAMGYACAVGLVLLIIVMVVNMIQLAATGTFKKEERMGEKRKNKDRLCTILMIVFFSILAILVILPIYTIFLASFKPGGDLLQYGLNLGIDWSRMSLDNYVLLFTGQHDYWRWFFNSITLTVVTVVATLLVSAFVGYGFAAYEFKGKNFMFVIVLLILSVPLEVIMLPLYKQMTTWGLMDNYIAIVLPFVAHASTIFFFRQYLLGLPKSLLEAGRIDGATEYGIFFKLIMPIMKPAFAAMAILNGMNAWNNYLWPLLVIRSSEKYTLTLGLNTLINPYGDNYSLLVVGSFFSIIPIFILFVCFQQYFIEGMTAGAVKEMSKTAKMIIDKDFQISKVDERIYGSFIEHLGRAVYDGLYQPGNPLSDDDGFRKDVIDLVKELDVPIIRYPGGNFVSNFFWEDSVGPVEERPARLELAWRSLEENKIGLNEFAKWTDKVNSNMMMAVNLGTRGIADACNLLEYCNHPGGTKYSDLRIKHGVKDPHNIKVWCLGNEMDGPWQLGHKTMEEYGRLAEETAKAMKLIDPSIELVSCGSSALDMPTFPKWESTTLESTYDYVDYVSMHQYYGNRDNDTADFLACSDDMDEFIRTVVATCDYVKAKKRGKKDINISFDEWNVWFHSNAADDDITQNHPWQVAPPMLEDIYTFEDALAVGLMLITLLKHADRVKIACLAQLVNVIAPIMTDQGGGAAWKQTIFYPFLHASKYGRGVALMPLVQTTKHDTAKHENVTDVESVAVYNEEKEELTIFAVNRTLEDDIELTTDLRGMEGFHLVEHIVMEESDLKLVNSSYEEKVVPKTVNRSKMDGGIMTTLLGKASWNVIRLSKMKFWAIDSPVMRVLGRLGDIIILNMIFVVGCIPVITIGTSLSALYAVAMKMARGEDPSVWKEFWKAYKRNFRPATICWLVMAVIAILLFVDFRIIGVLKRGSESMYSIMRIVLAVILGMWMLMFQYLFPYIARFENGIFATLRNALLLAAAHIPSTIVIVGLSVGSLILTLFTSRSFVIASIIWVFFGFAVLAYVQAFLLCRIFEKYEKMVKLIASDLDGTLLQNGAHDVNPIVFDQIRTLKEHGIMFAAASGRQYLNLRRLFTPVQDDIAYIAENGSLCIYNEETISKGIIEQDLAYRILDEVAKYPQYNCIISGERVCYSTSKNPEFYNHMVNVIQNNMKFIDDPRTEIPEPILKIAVCDYSGTDACEKHLKEMFSSDIKVVTSGNLWVDFICPTANKGSALKDLIDHLHIEAKDCVVFGDQYNDVEMLQTAGTSYAMANAAPGIDKYATNVTDSVEKILQQIIDELPAVMKIGIANDHSAVDMKNEIVEYLESLGHEVVNYGTDSYESCNYPEFGEKIGNAVASGEVEQGIAICGTGAGISLAANKVNGIRAVVCSDPYTARMAKEHNDANVIAFGARVIGIETAKCIVDEWLNAKFEGGRHATRVDMIMDVEKRNHNLMKIAIGCDPNAQQAKEELIKFMEDKGYGEIKDFGSEDPIYANTAVAVAEAVASGEYDRGILICGTGLGVSIAANKVKGAYAALLSDIYSAKRARLSNDANIACMGAFTIGNKLREELTDAFLTNEFVPGCSSQPKVDAFREYEAAHQKMSKKLFFGSNLKMYKNIKDTVSYLQELESLTKDISRDEIELFIIPSYTTLDSASKAIDQKNIRLGAQNMCWEEQGQFTGEISPLMLQEAGIGLVMIGHSERRHVFGETDIEENKKVLCALEHGFKTLLCIGETAEEKEFGISAEVLRTQLKVGFHGVSVEDAKNIWVAYEPVWSIGVNGTPASADYAEEMHKVIKQTLHEIFGDAADEIPALYGGSVNPGNACDLIVQPSIDGLFTGRAAWQADKFDTLIRDAIKAHDAKMSTQYKPITAITMGDPAGIGPEIVVGTMLSEEIHDCCRPFVIGSIAIMERAAKVLGKELKYNKIEDPSEAKYEFGTVDIIETGDYDTDSIEWGKVQALAGRMAVDWIMKSIELGQAGKIDAVSTAPIHKGAIKLIGVKEPGHTEIYQNATHSPYALTMFSCHKLRVFFVSRHMSLVDACHYATKDVILEDVINIDKELRKVGIENPLIAVAGLNPHNGDNGLFGREEIDEIEPAVKAAQEKGINAIGPCPADSVFHIGKSGKFDAILSLYHDQGHIACKTLDFEKSVTLTFGLPFIRSSVDHGTAFDIAGKGIAGCISMIESTKVVAEYAAKQHEKKEAMPLIGAVADDLTGATTTGVLLARSKARTAVFFNEEAAQEARETASLDAILISSNSRPLPKEEAYDKVKSATNALKAMGVKYFSKRIDTTLRGGVGVEIDAMLDQLNEDTIAVVVPAMPQSRRILVGGYSVIDGVALINTPVAQDVRTPVKENYIPRLLAGQTRRKVGLVTLDQVLKGKEGIKEALTEVRNDGAGVIIVDAITLEDVDQIAQACIDLDWDVVAVDPGPFTSKLAYRRGLIQEEQPNVPPAASEEGKTVLIAAGSATPVTKKQMQVLCEDSRHVRISVEPIPLINGGDEALDEAFKAVNKAVELIESDKQPRAILFETALHGELLNLDEEDKKRGYAGGMSANRINAGLGTIISQVLEQVGREKIAGLYTTGGDTMVNVCYQLGVECIEVMDYVIPQTDVGRLVGKYDGLPVVGKGGLTGNDNTACDIVERLFKESARMSEEKTQVQNARKDLDILNKMKNLPGGLVIIPLVIAVVLATFVPQVFQIGGYVTALFYEGNACMMGFFLIVCGSMIDIKQVGMPLYKGVIMTGTKFLLGVIVGLIVGKICGPEGFLGIAPFVLIATITNSNGSLYISLSSQFGNATDTGAISILSLNDGPFFTLIALGATGLANIPIKSLIAVLVPLLIGFIWGNLDKGFRDACKTAQPIVTFFMTISIGAKTDIKTILTAGASGIVLGLISAATAVIFFFVINLLLPKKERNAMGAAIGTTALNSAMTPAAVAEADPSMEGMVSMATAQCATASIITLFLCPFITAAFDKWMQKRQKGIYSPEGWAYDKVKANMSMVEKETKVVNENKMMVNMTKEALYDFLLFHAYSKFSGFLVNILGLAVAFMGIFSYTTGRVSGIGAALYLVAAVIFLGGTPFQLKMRAKKQVVVNREYNAPVEYTFSEKGITLEQNGESKTYEWEQIERAVVTPKTIGIYYAPECAMILPKEDFGDQFVPIFTTIATQLGQSKVRMRMEERRNEILKELDRKGRVKVTDLSKEFGCSEVTIRNDIKAMDIEGLLKRTHGGAVKVETETERKYSAETIYRNVTQKKQIAEAAYEFLDDRDTIIIDDASTSFYLAQEIKNHPEKRIAVVTNSLIAGNELAGVGHVELFMIGGYVTGHLAATMGDVAIQNMSKFHVDKAFIGVHSINFNVGLTSIATPQMEVKKAIMKAAEKVYVLADSSKFGGGYLSVICPTNEVDKIITDDGVSKEDIQKAKELDIPLVIAMERQQKAYKGVIDYFKKKIMDGELRPGEKLPPERDIAERLNVSRNSVREAIRIMDMTGVISSQQGSGNYITCEFQKSLAETMTMMFAMDQIDYKQISQIRQALECLAFSLAIEHASDEQIKEMESLVKELDKSTDDVKNAALDKKLHFMLAQSSGNILVLDFLEACSGVIDSFIHDMRAAILRTEERKKLLNECHKKLIEALKEKDETKGQEALKRHFMLINEILEERENRKIMAYSIMLDAGHGGAKDPGAVYEGRQEKDDNLKLVLAIGEILSDRGLDVEYTRTTDVYETPYEKAMKANNAGVDLFVSIHRNSFPVDNEVEGVESLVYDLSGLKYEMAQNINEQLEGVGFVNLGVKARPNLVVLKRTKMPAVLVEVGFINSDTDNQLFDDNFQDIAQAIADGILDTLESNGLIQEEKVPVYRVQVGLFRNQRYANRLLNELLEQEYPAYIDRSGPYHRVYVGEFDNLNDAVQMERRLKRAGYQTLIVQMKSLWNMLNKEFTIEGAVSAFLVINIIAWTLITMGVGMLVCKFLGFSIGGNMTNLMCAGIYGGLIVGLIGGILYLYELYRHHSMEMADRLEFKEKLAGILALAEGQNGKITVDEVEKYFEEDGLSQEQMNLVCDYLLSMKMAVVGYKQTGGTVKEAEKEEKQPLSAEEQKYVEEYLRGLGDMKEETQEEVRMAYYLPKVVEEAVRLHHPEVFIGDMIQEGNIALMVALKEIPKEKDEEEILEQVRAGMMASLESQTEVKRRDHKMVEKVTELDEAIKSMKEEYGRKVSVDEVAERLGISEDEIEDILKLAGEEVKDEEMDTSVAIQLIILLILLILSGFFSSAETALTTVNRMRIRGLADEGNKKAKTVMHITDDTSKMLSAILIGNNVVNLSAASLTTTLAYNLGGSMVAVASAVLSVLIIIFGEITPKTMATLHAEKMSLRYAPVINLYIKVMTPFVFIINKLSDIILRVLHIDPNAKNNQMTESELRTIVDVSHESGVIESDEKEMIYNVFDLGDAKAKDVMVPRVHVTFADVNATYEELIDIFREDKFTRLPIFEDTTDNVIGTINMKDLLLYDKEKEFHIRDFMREAYFTYEYKNISELLVEMRQASFNIAIVLDEYGETSGLITLEDILEEIVGEIHDEYDENEEDFIKQIGEREYIVEGSTNLDDLNDRLDLDLTSEEYDSVGGFIIEHLDRLPEIGDGVTTEDGIHLVVEKLDKNRIESVHLYLPEPKPEDEEGDEDMNQELGKKLLSILKEEQVKKDEPMKSHTTFRVGGPADYFVTPQTAEEVAKVIEACTQEKVPYYIVGNGSNLLVSDKGYEGVIIQIYKQMNQVKVEGAQIHAQAGALLSMIAKRALDAELTGFEFAAGIPGTLGGACVMNAGAYGGEMKDVLKSVTVLTGKGEVKTLAKEELELGYRTSVIAKKGYIVLEAVLELQKGEKEKIQAVMDDLKERRVTKQPLEYPSAGSTFKRPEGYFAGKLIQDAGLRGFQVGGAQVSEKHCGFVINKDQATASDVMNLMNQVSDKVYEEFGVRLQPEVKRLGEFMRCVIVTGMSGAGKSTALKMLEDMGYFCVDNLPVPLIPKMAELLSVPGTEINKAALGVDIRSGQNFSELEKILKDLDQSGTRFEILYLESRDDVLIKRYKETRRFHPLSGKGGRVEEGIREERKRLKFLRERADYLIDSSHMLTRELRAELSKIFVENKEYKNLYISVLSFGFKYGIPADADLVFDVRFLPNPYYIDELRPKSGNDREVREYVMNNDKAREFLAKLTDMIEFLIPNYVQEGKTQLVIGIGCTGGKHRSVTLANELYEALQKNDNYGIRIEHRDIGKDAITKARMSFSGKVKEELLEHYARARHCDIAELSAIVHMAGEFKVGHGGVCCLKVHTENLGVARKCFTLLVKTFNIKTDVVVRRNTGKDNYSYYIYAKGEELLAIRDTIVQAVCCKRAYIRGAFIASGSMSDPSKSYHFEIVCNDENQAEHLKEMMNSFGVDAKIVQRKRTYVVYLKEGSQIVDMLNVMEAHVALMELENVRIVKEMRNSVNRKVNCETANINKTVSAAVRQMEDITYIRDQIGFDKLPEGLRDVALTRLAYPEAALKELGQLMASPLGKSGVNHRLRKLSEIAQGLREQQGGASRYDMIRKPVTIQNNMDMEDRPVAHLVQEASQYASQVYILMGSKKINAKSIMGMMSLKLQKGEDVTIIADGQDEDAAVSGVATFLGAQKMKRLLFIYNPHAGKELLKPKLADVIDIFVKAGYEVVAYPTQAYRDAYKKIKKYDSNEYDLVVCSGGDGTLDEVVTGMMKRDRDKRDPIGYIPTGTTNDFASSLHIPRGLLEAADNAVNGEVFSCDAGRFNDDIFVYIAAFGLFTDVSYQTKQSMKNVLGHLAYVLEGAKRLFNIPSYKVKVTHDDEVIEDEFVYGMVTNSRSVGGFRNLVGKQVGFDDGVFEVTLIKTPKNPIELQEIIAALMIQQMDSKYMYTFKSGRIMFESIEEIPWTLDGEFGGEHDEVVIENLNKELQIMVPGTHEEDMKNLLIVSHCILNNAAKVEQDEAELAEEYKIREELMQLILKKDVQLLQLPCPEFIMYGSQRWGHVKNQFQHPFYMEQCRKILEPVLLQLQEYAQHVEKFHVLGIVSVEGSPNCGYHLTCEGEWKGEIGTDEKRIQDIQKSLKMTENPGVYMEVLEKELQKRNMEIPIVTMKEAVQLLNNMKNRKVYVTTFCGVAVAMNIVLGIITSALGIPLYLDTLGTVLSAAILGPVPGIIVGALSNIITGLIYSVSDIPFCLVNMAVGLIVGLVAKKWKFGIVPAVITGIALSFICPAIGTPIGIYVYGGLNGSVSDMLVMSLVQGGKTIFQASFLRNVASNLIDKIGTCIIGCLLIKAMPMRFMDNFKKEAMIKIENLVHKYTIWKDENTKSEKTVLDGISLDIPSGQFVAILGPNGSGKSTLAKHLNVLLLPNEGTVWIDGKDTHAKERLWEIRSQVGMVFQNPDNQIIGTSVEEDVAFGPENKNIEPEKIRKIVETVLRKVKLWDRRKASPSILSGGQKQRLATADALAGLPACLVLDEPTAMLDPDSRKEVINIVKELNRKEGMTIILITHHTDEVVDADRIVLMKDGKIIGDDIPKKIFADYELLKKAKMDIPPVVELGMRLEKQQIGLEGPVLQEQEMIEKIVKLYRSKCGGKKDAARMLQGKHITFSYSDSAKGKIDVLKDVSFEIREHDFIGLIGTSGSGKTTLIKHLNGLLKAESGEIFFNGENIYSKKYPISKLRKEVGLVFQYPEQQLFGRTILKDVMYGPLNLGMSEEEAEKSAVESLELVGISKEYYHLSPMELSGGQKRCVAIAGVLAMQPEILVLDEPAAGLDPETKNEIFELLCRIRKERNNAIVLVSHHMEDVAQFANRVWVMHEGKIAMDGTPEEVYGRVEELEEMHIGIPQITHLTYSLIQEGLPLPRPAINVADAEEMLVRIFKGEKERMIRDITIGRYYDSESVIHRMDPRTKLMGVLVYIISLFLVKNVWWYLGCLIVMLVLYRLARVPVGYLLKGLRGILVLLCFTFLFRMLYTPGDAVASVWIFTITKQGIWKAVQMTARIALMITGASLLSYTSTPKELADGLEKAFSGLGKIGVPVHEMAVIVMIAFRFIPIMLEELNVLMDAQAARGARFEEGNVVEKCKGVMTLLFPLFLMTVRRSSDLAMAMEARGYTGSTETSRMYPLTYKKEDRAGYIVILIYLAVFIIGRISFLFFMLVSAKEMLDKAVEGHYAVGQFNINNLEWTKSILLTAEELKSPVILGVSEGAGKYMTGFKTVAAMVKAMMEELNITVPVALHLDHGTYEGCKKCIDAGFSSIMFDGSKYPIEENVEKTRELIAICREKGMSIEAEVGSIGGEEDGVIGRGECADPNECKMIADLGVDMLAAGIGNIHGKYPANWEGLSFETLDAVQQLTGKMPLVLHGGTGIPDDMIKKAISLGVAKINVNTECQLSFADATRKYIEAGKDLEGKGYDPRKLLKPGAEAIQATVKEKMELFGSVGKAEMSEAINVAKIFGEDVFNDTVMQERLPKKVYKDLKKTIEEGKELDLATADVIAHEMKEWAIEKGATHYTHWFQPLTGVTAEKHDSFISAPLPNGKVLMSFSGKELIKGEPDASSFPSGGLRATFEARGYTAWDCTSPAFVRHDAAGATLCIPTAFCSYKGEALDQKTPLLRSMQAINEQSLRLLRLFGNTTSKKVTPSVGPEQEYFLVDADKFLQRKDLIYTGRTLFGAMPPKGQELDDHYFGTIRQRIAGFMKDVNEELWKVGVTSKTQHNEVAPAQHELAPIYAECNVALDHNHIVMQTLKRVACQHGMKCLLHEKPFAGVNGSGKHDNWSLTTDDGKNLLEPGKTPHENIQFLLVLTCILKAVDTHADLLRESAADPGNDHRLGANEAPPAIISVFLGEQLEDVLEQLISTGEATHSLKGGKLQTGVDTLPDLAKDATDRNRTSPFAFTGNKFEFRMVGSRDSVAGPNVVLNTIVAEAFSEACDVLEKADNFDEAVHDLIKKYATEHQRVVFDGNGYSDAWVEEAERRGLPNIRSMVEAIPALTTDKAINMFEKFKVFTKAELESRAEIKFESYAKAINIEARTMIDMASKQIIPAIIKYTKELADTVVAVKEAGADASVQAELLTEVSGLLAESKKALEALKVVTDQAAAMEEGEDQARFYHSDVVPAMEALRAPVDKLEMIVDKEAWPMPSYGDLIFEVMTKREFLDKLKKALANDLSGNVIRDNVDYYNDYITEEVRKGRKESEVIEELGDPWAIAKNIITSEEIKGNTGETYDSYEPERQRSQTYEQGYDEESGHRVHVFGLDTWWKKLVLLLGIIGVIVLVVAVIGGIISILAPIFVPLLILCLILKLVKDSRRMAKNYNSSENCHNASDKNTSNKNASRNTSNKNSYGKNAYDKNASNKNAYDKDAKDKNSYNYGNENSQYMKKMELIAPCHFGLEAVLKREILDLGYDISEVEDGRVGFWGDAEAICRANIFLRTAERVLLKVGSFKATSYEELFENTKALDWENYIPENGKFWIAKAASVKSKLFSPSDIQSVMKKAMVRRLQQKYHVEWFEEDGAAYPVRVFLKKDVVTVGIDTSGVSLHKRGYREVAGKAPITETLAAALIMLTPWHKDRILVDPFCGSGTFPIEAAMIAANIAPGMNRSFTAEEWTNLIPKKLWYDTVNEANELIDDDIEVDIQGYDADGSVIKIARRNAREAGVDHLIHFQERDVKDLSHPKKYGFIITNPPYGERLEDKKDLPALYKTFGESFKNLDSWSAYMITSYEDAERYFGRKADRNRKIYNGMLKTYFYQFLGPKPPKAKRPGEKQEKRMEKIIFATGNEHKMIEIRAILSDLGAEILSQKEAGIKADVVEDGATFEENAMIKATEIAKIANQMPEYKNAVVLADDSGLEIDYLNKEPGIYSARYMGEDTSYDIKNQTLLDRLEGVPDEKRTARFVCAIAAAMPDGSCEVVRGTMEGIIGHEIAGENGFGYDPIFFLPEYGCTSAELSPEKKNELSHRGEGLRKIRKILEHKMKILIISDTHGSHKNFDRVIEKERPLDMLIHLGDVEGDEDYIPAVADCPVHMVRGNNDFFSDLPGEEEFMVEGYHIFTTHGHGYYVSMGETRLKQEARGRGADIVMYGHTHRPFYEKEEGLITLNPGSLCYPRQPGRKPSYMIMQIDSNGKLEITQEYLNMQAVSFLIPKYAREVAGCQSARKELPVVDPVGGKFTVMSLSNKKKTQSTSDIFDDDFEVIYEGDLPDISIDDDDDYRDVLSGLSDIDHTDYIKKNDYDRLTKKLKNKNKKAGKKNKKQSKKDNFFDTAYYDDDIFDELDDDLYDDEYEDDYDNEYEDDYDDPRNNRQKEKKSRKNRGVKVPNVAKPVAKTAKAGGKILFKFINLLLRMGTLLLIAWIIYLLGLHFLANAGSFGNIVSRLTSADQELIAYLAIGAVLLLYEVIIFFCVLGGSKKQGRRGNSIDNGRGLTSFIIIAVGSYLSAMFAVLIPQAPAALLGIHNALTVYGGLKDTLLPICIAGVVSCIIRKFIIKMTEFYYFALSFFVYGFLGWCTEVAYAAVKQGKFVNRGFLNGPICPVYGIGVGVVVQFLTPVENNLVLLYISSTILVTAIEGITGFLLEKIFHNKWWDYSDQPLNIGGYVCVLFSLIWGVFCVLIVKVIHPLIYKVLTMIPFVLGIIVMACLAVGLLADLYVTASAILKMNRKLETMEKIAAELKDLSNKVGENIYENVMEGMEFQKEKKEQLGNVREELKERLEEPKAIMNGLRDGVKERLEEPKARMEKLDPKINVEEMKARMEELKAKYEEMAENRTKVGERLVKAFPKMQVRQHKEIFEELRERVRRSKMNKKEVLEIRKQFSPENCAITRICGCYVDHEKEKKMEMKKAFLSLPEEEAFKYFDIFKHTLSGTIGKNLINMEFPLDQELNGGTQEFLMKLKNSKLQDDLLLEEFYDKVVESYEYGENYYIILIHAVYDVPGKTKDGLEMEDASDTVYEHILCSICPVNLTKAGLTYNAQTNNIEDRIRDWFVEAPVKGFLFPAFQDRAADVHNVLYYTKKPEELQPYFVEHVLGSTTPLTAGDQKTTFQAIVSDTLGEDSNYEVVRNIHDNLNEMIEQAKEEPEPLELSKTDVKKLLTRSGVAEEKLESFDDEFDETVGVHGTLLASNIASAKTFQIETPDVVVKVNPERADLVETREIDGRRCLVIAIDDHLEVNGIEINMGNIFDILGPVMVGPSSSHTAGAVRIGMVARQLFGRQPERAEVYLHGSFAATGKGHGTDRALIAGLLGMMPDDMRIPDSYEVAKDMGMDFVMKNKNIKGAHPNTAQIIMEAEGVPQMKIQAHSIGGGRICVCKLDGIDVNFSGESCTLIIRNVDEPGRIMEVAAALSKAEINVATMQVFRDKRGGTAVMVVETDQVIPQSAIDELESKPGIIRVKFLDPNGSVMSYQSMEEAKLRGEKENIPFWKAIQLEDAQERDVKIEDSWEKMKYMWQSMLDALDAYEPDKVSRSGLVGTEGGLMDNYRENEEPLCGDFVSKVMSNALKMGCNNACMKRIVAAPTAGACGVLPAVLVTYYKEYNVSEEKMIEAMYVAAGLGQIIANRAYLAGASGGCQAEIGSGSGMAAGAICYIKGGDTDQIGHACAMALKNLMGLVCDPVGGLVEVPCVKRNVGGAVNALAAADMALAGITSKVPVDQVIDAMKEVGDKMDVSLRETGVGGVAGTPAAQEVVEKLGMMTFYQELQLSSTGSKQLIKNTTDKKEKRRHILIYNFKVYLVMVFCVAVVSLYSKFIGNDNSVVGVTVLLAVLVLRQADFGIRTTHGLASIAGIYAILMAGPRLANMVSPVPAFFVNVICIMLLMILGCHNVIMYNHSTFVLGYLLLFGYDVSGHAYILRLEGLLVGMILCMIIFYKNQKNRPYRRKFSHLFQEFNIHSARSRWYIKLTFIVSSAMLIMSLLGLPRAMWAGIACMSVCLPFTNDCVARSGKRWMFNIVGGLLFIVLYTVLPKSMYAYIGIIGGIGVGYSAGYSWQTVFNTFGALSIASGLFGMPYAVALRIGANLFGSVYTVLCNKLFDKAHAYFHSTDLKTTLSMKDKNWTDIVSKQGDLRHFASMAIRKSGKSEHTSAQEIDFLFRIALSEEPLTPRQITNAMGISKTIVSRLTDHLESKGFICKEASASDRRSYCIRITGAGKDEIDRMYYYYLDPLYTLQKNMKKEKFETLFQLIREANEILSSQKKMESFEEVYQKYLKEVYCFLLRLSGDREIAEELTQQTFAIAFEKLENFRGECKLSVWLCQIAKHEYYAWTKKQKRYANKLDENHADQGEDLLNGIINQENGQIIRKILHDLQEPYKEVFMLRVMGEVSYRDIGQLFSKSESWARVTYYRAKKMIVEKMGGAGNDEMMMKCEIIRDLIPLYLDKVCSEDSRKLVEEHLAECSECRKYMKELETELEAVKQKKEEDLDEKRLLQEGAERMKEIGKKSIVDKMIIVDTLLNFLLIVTAVVLCKRQIDIEGADAGYYIAAMVFSFGFIIAFFICDCITLVQKWKRRKMQTEWEYKQIPICESYAKISIGVKVIIVFMLVCAACILGFSQFGGMFSIMGKLAGVSRQTISQIERGDYSPSVTLALKIAKICEVSVEDIFIYEEEINDEGKEKMKEKKSSYFTATWKMLAAVIIGGIAGGVSVVIYELMKKGIDAGIRTINGTIQQYIFPALIIIAVVTVVVGEYSLYRLKNVYKEMKDADEDRFYELDYEEEKWGAWTSGVNLVSQVACIIILSFGYSLKYIESGKSRYFLFACIIFILCYFYDIYLSVRYVKAIQAAHPEKKGDPTSSKFTEQWVESCDEAEKEIIYKSAYKTYIVLNKVIPILLLLTLIANMFLNTGILAVLVVAVIYLVTGMTYIRSCMVSKAKKLGMNHTNLFKTGSVNERFQYYEKLVAELTMMSDMFMRNVLNILECAEYVLRVITENDDLELTEVVVQKDYKNLQGRSAILDCVAVNGRKEIYDIEVQQEKAGAIPKRLRYHSSIIDVHSLYTGEEFEKLPESKVIFIVDEESDAGVEPILHIKRTVRETGGDYNDKSEIIYINARMKEDTELGRLMHDFHCTKAEDMYSEVLAKRVRVLKETREGVETMCKEMDKIYQVGEECGKEKGKYETAMKLLELGAREDMIAEAVGHSVEEIKRWKNDMKRQMMKVFAYRKCSTCMKALKWLEAHNVEFEERAIKEENPTYEELKEWYTMSGLPLKKFFNTSGMIYKQMNLKDKLKEMTEDDQLKLLATDGMLVKRPLVIGDNFVLTGFKEKEWEEKLLMTGRICGTGSCVPSFAMDNNDIAKLVDTSDEWIRERTGVVRRHIIREETTVSMAAEAGRQALENAGIAAEDVDLIIVSTISSNVILPCTACEVQKDLGAKHATCFDLSAACTGFVVAYNTAAAYLNAGVYQTALIIGSESLSNLTNWKDRGTCILFGDGAGAAVLKREDTGYYLPVTHSDGFRGEALRCKSRYDRSELSPEDMPKPEEKEYLMQMDGREVFMFAVKSVPQAIKEVLEKNDTAQEEISFYILHQANRRIVEAIAKRLGEPIEKFPMNLEEYGNTSSASIPILLDELNRAGKLNRGQKIILAGFGAGLTWGASILEWMLEQIKKMVADNLGVEESKITENASFKDDLGADSLDLFELTMALEDEYGIEIPSEDLEKIVTVGDVVEYVNAHKEMQTEVTRLLGIEYPIIQGGMAWVAEYHLAAGVSEAGGLGLIGAASAPADWVRDQVCKAKELTDKPFGVNIMLMSPYADEVAKVIVEEGVKVVTTGAGNPEKYMKMWKEAGVKVIPVVASVALAKRMERCGADALVAEGCEAGGHIGESTTMVLVPQIVDAVSIPVIAAGGIADGRGIAAAFMLGAKGVQMGTHFVVTDESQVHENYKERIIKAKDIDSRVTGRTTGHPVRALRNDMTRKYLELENAGAGFEELEKLTLGGLRKAVVEGDVKNGSVMAGQIAGMVKERMSCKDLIQKLVTETDTLIGGQGFYEMSKIAFIYPGQGAQKAGMGADFYENSEIARYIFDQAGEELDLDMKELCFEENDRLDLTEYTQAAMVTTCLAMTRVAESKGLKADITAGLSLGEYPAIAAAGGMNDMDAIRLVRKRGILMQNTVPAGEGAMCAVISMAAEEIEKVIEPIADVSVANYNCPGQIVITGKTDAVEEAAAKLKEAGARRTIMLNVSGPFHSQMLVPAGEKLAEELEHTRFHELRIPYVTNVTAEKVTDIRETPGLLTTQISSPVRWMQSMERMIADGVDTFVEIGPGKTLEGFLRKIDRSVKVFHISQWEDVDKVCTELADSGKMMEEAMSQTMEGKVAVVTGASRGIGKAIAVKLASKGATVVINYNGSRERAEEVKNEVESAGGKAVIIQCNVADFDACKEFIETVIKEQGRIDILVNNAGITKDGLLMKMSEEDFDKVLDTNLKGTFHTIRAALRQMIRQRSGRIINMASVVGVSGNAGQANYAASKAGVIGLTKTAAREVASRGITVNAVAPGFIETDMTEVLPEKIKEASAAQIPLGKFGKAEDVANAVAFLASEDAGYITGQVLHVDGGMVMMKRRVVVTGLGAVTPIGNTVEEFWSGIKEGKVGIGEITKFDTTEYKVKIAAEVKDFQAKDRMDFKAARRMEPFSQYAVAAAKEAFEDAGLDMSKEDPFRVGVIVGSGIGSLQAVEKEYEKIRTKGPGRVNPLLVPMMISNMAAGNISIQLGLKGKCTNVVTACASGTNCIGDAFRAIQYGDAEVMLAGGAEGCICETGVAGFTSLTALSTSTDPMKASRPFDKDRDGFVLGEGAGVVVLEELEHAKQRGAVIYAELVGYGSTGDAYHITSPAEDGSGAAKAMELAMEEGGIEPSQVDYINAHGTSTHHNDLFETRAIKLALGDAAKDVVINSTKSMIGHLLGAAGGVEFITCVKTIQDNFIHQTVGTETPDEECDLNYAIGAPVEKEVNYVLTNSLGFGGHNAVLLLKRYEDMEMEKMIELIDAVSKSDLTGFKYEEDGIKLHLSKKENTCYVTESVSAPVNMTGTASDGVVSAEMGKTNAKGDQTLGAAAEEAVAGNIVESPLVGTFYSAPAEDAESFVKVGDRVEKGQTLGIVEAMKLMNEIESDYSGTVAEILVNNQEGVEYGQPLFRIVMNHLNINQIKEIIPHRHPFLLLDYIEDYVPGEYAVGYKCVSYREEFFAGHFPEEPVMPGVLTIEALAQAGAVAILSLEENKGKIAYFGGINKCKFKGKIVPGDKVRLETKIIRRKGPVGVGEAVASVDGKVVVSAELTFMVGMIKKVLIANRGEIAVRIIRACREMGIETVAVYSEADKEALHTKLADEAICIGPAPSKDSYLSMENIISATIISGADAIHPGFGFLSENSKFAELCEQCNITFIGPDSKVIASLGNKQVARNTMMAAGVPVIPGSKEPVYDAKTGAELAREIGYPVIIKAALGGGGKGMRTAWTPEEFESAFQTAQKETEMAFADSTMYIEHFVENPRHIEFQILADKYGNVIHLGERDCSIQRNHQKLIEESPSVALSDELRKKMGDAAVKAAKAAGYENAGTIEFLLEKSGNFYFMEMNTRIQVEHPVTEWVTGVDLVKEQIRIASGQKLSYTQEDIRLTGHAIECRINAENPEKGFRPSPGTITDMYLPGGKGIRIDSAIYSGYTIPPYYDSMVAKLIVWAKNRQEAIRKMQSALGEVIIEGIDTNVDYQYGIVNHPDYIEGNIDIEFIERLMKLDNVFKKTRIAVGRKNYITFTRRPEVPEGLLRKCNKCGGAIIAEDVKKDHYICPKCGGYFRVHARRRIEMITDEGSFEEWDSDLQGGNPLEYKGYEEKLKKLQEKTGLSEAVVTGKAKIDGREAAIGVCDGRFLMASMGEAVGEKIARAVERATKERLPVILFACSGGARMQEGIVSLMQMAKTSAALKRHSDAGLLYISVLTDPTTGGVTASFAMLGDVILAEPKALIGFAGPRVIEQTIGQKLPDGFQRAEFLLEHGFLDAIVERPQMKETLSKILALHEAGEGTGFNRKKCDVELTSGSKMNMTAWQRVELSRRKDRPVGSDYIDALFTDFVEFHGDRYFADDKAIIGGVARFHGTPVTVIAQAKGRNTKENIERNFGMPQPEGYRKALRLMKQAEKFSRPVICLVDTPGAFCGLEAEERGQGEAIARNIYEMSGLRVPVVSIIIGEGGSGGALAMATSDEVWMLENSIYSILSPEGFASILWKDSSKAKEAAEVMKLTAENLKAQGIVERVFAEPEEYIVQNMDVVVMQMDEAIEEFLMKYKSLSEQELIEHRYERFRNMMKIQPLKIGTKTAKVPVIQGGMGVGISLGNLAGAVAKEGGIGIISAAQPGFREEDFIKDPLKANLRAIKSEYEKARKIASDGIIGFNLMVAMEHYEEYVHAVVEAGADLIVSGAGLPTDLPKYVGESDILLAPIVSTAKSANVILKYWDKKYHRIPDLVVIEGPLAGGHLGFHEEQLEAYGIDAGAEDYVKCRTSYEKEIIAIMQVIHTFSEKYGKKIPVAIGGGIHDSESAARAFSLGADAIQVATRFVTTEECDADIRYKEAYLNARKEDIVIVKSPVGMPGRAILNPFMKKVKELGRIAPAHCFQCLKHCNPGTTPYCITQALINAAKGKIDDALLFCGAYAYQATHLETVKEVIDSLIPERVMGMDDAYKMINQTLVSLINEIWELEEKAIITDEFKDLTNNDMHVIEAVGLGDGNNMSSIARKLNITVGSLTTAMNSLVNKRYVERHRSEEDRRVVLVKLTEKGVKAYHHHEDYHRQMTQAILDKLDDTELPVLVKTLDALSEFFTGYSENKESMVKGVIFDMDGTMFDTERLSTKGWIYAGKKLGVDIPVALTDSFRGRNPQAIRKKFAAYFGDRLDYDTARAMKHEYFDEVTKESVPHKEGLQDLLEYLKEHEIPAVVATSTERKRASRLIHMSGIEHLISNAIYGDMVERGKPEPDIFLKAAELIGQDPKECLVLEDSAPGLLAGKAAGGYTIYVPDIAVVSKEAKEGITAELADLHEVAAWIRKENKKMYEKEVEQLQNIIDDSKRIVFFGGAGVSTESNIPDFRSADGLYQQKYKYSPEQIVSHSFFVRNPEGFYEFYKEKMMFLDAKPNAAHLKLAELEEAGKLTAVITQNIDGLHQAAGSKNVLELHGSIHRNYCMKCHKFYDAAYVKNASGIPRCTCGGMIKPDVVLYEEGLDSDVISRSIKAISEADTLIIGGTSLVVYPAAGFVDYFRGKHLVVINKSATAREVGAKLTIAAPIGEILGRVHMAAEAGQLELNAFEPVIFYTLFESIEALGHAAQTLTDNCILGITANEKHCKDLVNASAGIATALCPSIGYAASAALAKESLKTNVPVRTLAVTKGYVTEAEAMNMELEPVQKPEFYPFIESIPNVIECNCVTGNYSMLMKVAFPSTIELDGFIGQLQHFGKTQIQIVFSTPVAGFYLVSFLIDQADITVLQCSMPAAGEAMSLNSTPSSERIHIGIFGRRNAGKSSLINALTGQNLAIVSDVRGTTTDPVFKSMELLPLGPIVMIDTPGLDDEGELGKLRIQKAYQVLNKTDIAVLVIDGTSGITPQDNAILTRIQDKNIPLLLVLNKADLVSEHTHQEMIVSTHLKYKIPLEHILWTNTTENLHIHELKERLGTLVPAEESSRFIVRDLVTPGDFIVLVVPIDSAAPKGRLILPQQQTIRDLLDAGTTAIVVKETELKSTLDSLGKKPALVITDSQAFKEVDKDTPSDIPLTSFSILFARYKGNLETVVHGARALDTLEDGDTILISEGCTHHRQCDDIGTVKLPRWVREYTGKDIDFEFTSGTEFPLKLNHYKMIIHCGGCMLNEREMKYRLKCAGDASVPITNYGTAIAYMKGILERSIEIFPQLRKMNETNLSLKYLIDQLHKEQTLTKEEWITLIEGRTPELSEYLFSMAREERHRYYGHDVYVRGLIEFTNYCKNDCLYCGIRKSNGNTHRYRLSEADILKCCKEGYELGFRTFVLQGGEDGYYTDERIIHLIRIIKERYPDCAITLSIGEKSKDSYQAYYDAGADRYLLRHETYNHEHYRKLHPPNLSPEHRQQCLRDLKDIGYQIGCGFMVGSPYQTSEHLAEDMLFMKELNPHMIGIGPFIPHHDTPFAGESAGTLELTLYMLGLIRLMIPKVLLPATTALGTIHPKGRELGILAGANVVMPNLSPTEVRKDYLLYDNKICTGDESAQCRHCLEMRMKSIGYQVVTDRGDSLNIMGIGKRILSVLIGILFIISVSVLGGSLLAKQVLVKAISQAGIDTAISHRMMDAVFGYAGADDTQWIAKIQNKIEKNEEVQKITEKVMDEMVNDLSKGTGYKDVDISKELNQLLEDSMKEIKDSNPELTEDMLKLMKQQLKDEMDDVQDVLNSYASNLYDNMKDTSTIQGKVARLYTTLVSTTCRAVSGAAVLLCAILTVLLGYPRHRGLFSLGVESLICGGIFAGLIGVMGSRTMGFLSDKMLGRTVDIGLKSYFWMGCIFAGAGVIFLLAGFIIKWKDQKRIDVNEMETQHIIHNFEPIYNEHSKILMLGTMPSPKSREVGFYYGHPRNRFWKVVSDVCSEAYPETREGKIAFALRNGIAVWDVLAGCDIKGADDSSIRNPQPNDLSRILECADIKAIFTTGTKAFQLYKKFCYPKTGIMAIGLPSTSPANCRTSYEQLFEAYSEIKKYIMNREERVRILIDYLKKENTGYASLADPVDYTGRRRLLRSLMNVRWPGEADPEYTRIQDELLKEEAEQKGIVEWGQLPTIGGQFPCETIKNVDKISLWRGDITRLSVDAIVNAANSQMLGCFVPCHGCIDNAIHSAAGIQLRNECAQIMEAQGHEEPTGKAKITKGYNLPAKHVIHTVGPIVGMQVTEKQEEELKSCYLNCMKLAEKEGLKSIAFCCISTGEFHFPNKLAAEIAVKTVDKYLSSSKLERVIFNVFKEEDYNIYKKIFAMDNLVFSLNATVPIFLMMILGLFFNKIGWMDEEFANKMNKFVFRVPLPVLLFGDLAVVDIKEAWDTKFVIFCFIITLISITIAIGISCLLKDRSIQGEFIQGAYRSSAALLGIAFIQNIYGNSGQAPLMIIGSVPLYNIMAVVVLSFFKPGQKGMDKALIKKTLIGIITNPIIIGIVAGLLWSALKLPMPVILHKAVSSIGGVATPMGLMAMGATFDIKKAFGKIKPTMIAAFIKLVGFVAVFMPLAVAIGFRREKLIAILVMLGSATTVSSYVMAKNMGHEGVVSSSVVMLTTMCSAFTLTGWLYIMKCFGLVMSENLEKTYNPKAIEAKLYEKWCDNKYFHAEVDRSKKPFTTVMPPPNITGKLHMGHALDNTLQDILIRYKRMQGYNALWIPGTDHAAISTEVKVTNQLKEEGIDKKELGREKFLERTWQWKEEYAGTIEGQLKKLGVSCDWDRERFTMDEGCSKAVEEVFIKLYNEGYIYKGSRIINWCPVCKTSLSDAEVEHEEQDGFFWHIKYPIVGTDDYLEIATTRPETLLGDTAIAVHPDDERYKDIVGKMCKLPLTDREIPIVADYYVDKEFGTGAVKITPAHDPNDFEVGKRHNLPEINIMNDDATINEQYGGKYAGMDRYEARKAMVADLEEQGYLVKVVPHSHNVGTHDRCHTTVEPMIKQQWFVKMEELAKPAIEAIKNGDLRFVPERFNKIYLHWLENIRDWCISRQIWWGHRIPAYYCDECGEVVVGHGAPEKCPKCGCAHFTQDEDTLDTWFSSALWPFSTLGWPDQTEDLDYFYPTDVLVTGYDIIFFWVIRMVFSGYAHTGKAPFHTVFIHGLVRDSQGRKMSKSLGNGIDPLEIIDQYGADALRMTLMTGNAPGNDMRFYNERVEASRNFANKVWNASRFIMMNLDEKELKKPANFEKRPADCWIMSKCNSLVKDVTENMDKFELGIALSKIYDFMWDEFCDWYIEMAKYPIYHADEDPEAANAALWTLREVLKKSLKLLHPYMPFVTEEIYSKLVPEEESLMMSDWPVYEEEWNFPVDENIVDHYKEIIRGIRNVRAEMNVPNSRKATAFVVCEDEELGAGLALLGHAAQNMAALNELVIQKDKSGIADDAVSIVVPDATVYLPLEELIDFEQEIERLTKEEVRLTKEIARSNGMLNNEKFVSKAPAAKVQEERDKLETYQQMMAQVKERLEGLKAKQSMKKLQLKKPDIKGKIRKIKNLKKEDVIAYWKGRHERRERILEARRNSAFAKKMQPVYAFMNRFSLIFHALLACIINFVIEAISRHSVVAAWDYMTGTPLVFLYNAFMIFVTFSIVYLFKRRIFVRMIIGAIWVILGIANGYILLKRVTPFNAQDLKIAGDGIALINNYCNGFEVVVIAVGAVALLIWLISMWRRGGQYAGKIHHIAALIGIIVCGVLYTFVTNIAIDKRVVSTYFGNIAFAYEDYGLPYCFSASLFNTGISEPNGYTKKAMAKIDKDGELNQTATSRSSDELPNIIVVQLESYFDVANAEFFTTSEDACPNLHNLYQNYSNGYFKVPSVGAGTANTEFEVLTGMNLRYFGPGEYPYKTYSKKHPTESAATALASLGYGTHALHDNTGNFYSRANVFNNMGFDTFTSKEFMNVLQTTENGWAKDEILTHHIMEAMDTTKQEDFVFTVSVQGHGNYPETQVIENPKIKVEGIEDEALKNKWEYYVNQVYEMDQFVGDLIKAVEERNEPSVVVFYGDHLPTMGLKAEDLKSRYLYNTNYVIWDNIGLQKDDKNIPAYQLMSEVLNRLDIHSGTVFNYHQQRKGTKNYLSDLELLQYDILYGKQYVYNGKAPITEGHMVMGIRNVSLSSIVPQLNSGYSLYGENFTKYSRVYVNGEKQKSSFLNNTRINLSETELKDGDVIQVGQVGSSDTIFRMSDKYTYQNGQLVKQEGTATDKSKSWVDQDYDVNMLTKKEPETFTYEEAAAYIEEIPKFTKKHTLEHTKTFLKRLGNPAADRKIVHVAGTNGKGSVCAYLQAILMAEGKRTGFFTSPHLVSVNERIRVDNIQIDNETFLKVFRKVLKIVRQMVEDGIEHPSYFEFLFGMGMTAFAETDVEYIILETGLGGRLDATNAIDNPTLAIITSISLDHTAILGDTIEKIAGEKAGIIKPGVPVFFDGSSKKAAEVIKAKASELGVSCREVTKNAYEIQEVHRKYIAFSRRSAYDKDVIFQVPMCGCYQAMNAELALEASEYLLAGEEIHMDRWKEALAELHWEGRMERVGAHITVDGAHNPGAMEAFVESVKALDESERGEMVLLFSAVSDKKYDQMIEYLCENLDVKAYVVTQIEDERGVPAEELADVFRRYTDRPVYCKERLEDAVRTAMNERGETGEIYCLGSLYLVGMMKKLLAGGAIDAMLDFEEELKKFQPSLEVEELGDAIYQDDLTDMTDLLREVIEQTKQDDPQMDYTTKLAYQSNYWYNDGLNKANIRDLTGAITSLKKSLQYNRDNIASRNLLGLVYYGRGDVVEALAEWVLSKNLQPKENIANYYIQKVKEKRDDLDRINQAIKRYNQALDYCYQRCEDLAVMQLKKAIEMHPTYVKAYQLLALLYIMEEQYAEARKNIRIAHKLDKTDDITMRYMHELNQVRKSRNIRLIDDKDTGKKKKGRQTVTYNIGNETIIQPVASGLKDNVGLHTMVNIAIGVIVGVAVMGFLIMPAVSASRQSKLNKQTVKFSDQIATQKSQISALKKELDNYRSSSKEAENQQQTAEITKTSYESLMTVISHYSTGDMSNSALAEELLKINSETLGASGKEEYDTLTGKIYPRVCESLYVTSQKNYQVANYDTAVTNLEQVVQMDEGYQDGAAMLLLAQSYEKQGKQDKANTYYQKIIEKYNGTEAATEAQNALDVQNAKKTKDNNNMKYQVQENCLTIFLPGELDHHNAEEIRKESDHLIEHNHIRYVIFDFADTKFCDSSGIGVIMGRYRKIYMLGGEVCAVHTSERIRKILMMSGVTKIMQIYEEEKMENTNEMTIIFDSYSSNEAFARVAVAAFMTSLNPTVEEVADVKTAVSEAVTNAIIHGYESRIEKITLRCKTCGDTLYIEIEDHGKGMEDVKKAMEPLFTTRPELDRSGMGFSFMEAFMDQVEVSSKPGKGTIVKMQKTIGKGRKVWTTQSLMDHTIALIQKSHEGDEEARAQIVEENTGLVWCIVRRFTGRGTELEDLFQIGTIGLLKAIDKFDLSYEVKFSTYAVPMISGEIKRFLRDDGMIKVSRSLKELSYKGYQAQEVLGRKLGREPSVTELAEYLDVSPEELTMAMDACTDVESLHRPVYKKEGQEISLMEKVGKEDGAEERVLDHLLLKELLTSLDKEERKLIYLRYFAEKTQTQVGKEMGISQVQVSRMEKKILKNLRERIMEDARRKIRMCLIFVVTLAVIIGLIYYFHDVRGNHGVNEGTLIKRMEITAKNDEINRRMTANSDDIYIKADRNIEVAKKSVTLGDVLKIECVNPAMLARIRSTHLLTFHHPDNKRERRVVMSVLKVIQKIHEIYPEASVENIGETDFIVTYEEQDGKGGVIHVAKIVMVVLISFFGAAFSTMAFNNDVGVTKMFGQIYELLTGTKSNGFTILEFMYCIGIIIGILTFFNHFGKKRLSVDPTPMEVEMRLYENDIQTTLVETYSRKEKELDVDEKHIPGNSGTMWMKNIFLAILGLSAGITAAGGLFSFIIGLGVVSDFADRTHTGEHVMLYEDAIAVGGSIGAIISVYHPTIPYGSWLVPLAGLFGGIFVGCWAMALTEMLDLFPIFIRRIRLVRGIGAIIIGIAFGKGLGALLFFWKRWMDKKRQQQAYENYVKQKTPVHNLPANMTKAFVTGGAICVLGQGILNICEKAGLDKDISGGWCSMLLVFLSAVLTGFNVYPRIAKWGGAGALVPITGFANSVAAPAIEYKKEGQVMGIGCKIFTIAGPVILYGIFTSWVLGLFYWLLRIVGVLMIKGKQSIAFEVSPYLEESASVVGKKEGEGPLGGMFDMVAEEDLFGENTWEEAESTMQKEACLLALGKAHLAPESIRYLFGGDLLRQGVATSMGVETLQIPMFGLYGACSTSGEALALASMSVAAGYGERMLAVTSSHFGSAEKEFRFPLGYANQRPLSAHWTVTGSGAFIVGKNRSHVRITGVTVGKIVDYGLKDSQNMGACMAPAACDTIIQNLEDFERKETDYDRIITGDLGYVGQSILFDLMRGKEHDIKINHMDCGMTIFDQNLQDTHAGGSGCGCAAATLSAYILPKISRGEWKRVLFVPTGALMSTVSYNEGASVPGIAHGIVLEHCMDYINAFWVGGLICALTQILLDRTKLMPGRIMVLLVCSGSVLGAFKIYPVIQDFAGAGASVPLLGFGNLLWKGVKEAVEKEGFIGIFMGGFKASAVGISAALIFGYLASLIFEPKMKKMQKTYFYRGLFYLMGLLILALGITLNTKTGLGVSPIISVSFSISTIWHFNFGNTTLVLYALFVVVEMILHTIRSLHARQSEGLPLEHANHMNLKLVLFMDILQFPLSLIFTRFLNIFSGMIPDLWTTYPDSFAGSFPGRILFLIIAIILTGVGAAMSLNMRIIPNPGDGIVQAISDFIHKSVGFTKNCFDLFNICLTISVGLIFAHHLVGIGIGTVLAVIGVGRAIAAFNHFFKQPMAVLSGMNESMKPIKEGKVREIYDNGDSLIMVATDRISCFDVILKNIVSKKGTVLTQMSKFWFDLTKDILPNHMISTDVKDMPEFFQKPEYDGNSMMCKKLEMLPIECIVRGYITGSGWKSYQENGTVCGIKLPEGLKESDKLPEPIYTPSTKAEIGDHDENISYEQSIAHLEKYFPGKGEEYAAKLRDCTIALYKKCADYALSRGIIIADTKFEFGLDENGNMVIGDEMLTPDSSRFWPVEGYEPGHGQPSFDKQFARDWLTSHPDNDWNLPDDIVQKTIDKYLQCYKMITGEELAMKHITIGILAHVDAGKTTLSECMLYLSGQIRKLGRVDHKDAFLDTYELERERGITIFSKQAELKMGNLGITLLDTPGHVDFSAEMERTLQVLDYAILVINGADGVQGHTRTLWRLLKRYQIPTFIFINKMDQVGTDKAKVLADLQNRLDEGCIDFSEITEETYNSLAMCDEKAMEEYLESEKIEEDTIAEIIGNRKAYPCYFGSALKMEGVQEFMDGMTGYVEKNEQINSTDTNTSNFGAKVFKISRDPAGSRLTYLKVTSGTLKVKDTLTGIAGKQQSKKESDLAQDRSETVMNSWEEKVNQIRIYSGEKYEMVQEAKSGMVCAVTGLNYTYPGEGLGIECDSEAPALEPVLSYKIELPEGCDVHKMLGNLRILEEEDPMLKIVWNEELGEIHAKLMGAVQIEILKSLIKDRFGVDVEFDTGNIVYKETIQNTVEGVGHFEPLRHYAEVHLKMEPGERGSGIVIGTDCSEDMLDKNWQRLILTHLLEKEHRGVLTGSVITDMKITLTAGRAHLKHTEGGDFRQATYRAVRQGLMQAESMLLEPYYDFQLEIPSGMIGRALTDIQRMNGETGTPQTEGEMTTIEGYAPVTGMRDYQMEVNSYTRGQGHLTCTFRGYEPCRNAEAVIEEIGYDPERDIENPTGSVFCSHGAGFNVPWNQVPEYMHLENQLEKEQALEEAKRQSEQAARQVPRAARTPGVYSKAAEKELEEIFIRTYGKVERKGGLTPKTYESEYAKKQRKKEEAMQEYLLVDGYNVIFAWQELKELAKVSIEAARDKLMDILCNYQGYKKCVLILVFDAYKVEGYALEIQKYHNIHVVYTKEAETADQYIEKVVHHIGRKYHVTVVTSDGVEQVITMGQGGTRISSRDFLEEIEYTKKLIEEDNEKQRVSDRNYLFDHADEEFVKKMEKIRLGKETEMKKKNDWIKKGILIIVLLVCIAAYLWVPGIHKTMNRIFKMFASGDFTVVRDFVASYGVYAALMSFLLMIFQSIAAPLPAFLITFANASLFGWWKGAILSWSSAMAGAAICFYIAKILGRDVAEKLTSKTGLEQIDTFFERYGKNTILICRLLPFVSFDIVSYAAGLTSMSFVSFFVATGIGQLPATIVYSYVGGMLTGGAKLLVTALLILFSLSALIFMLRKIYMDRQSGKMETYYNPEDLAKFGTIGEKASELAEKFFAYYNAVFEEGALTAREKSLIALAVAHTVQCPYCIDAYTNDCLDKGVSEEQMTEAVHVAAAIRGGASLVHGVQMKNIVKKLEFMKKKIVTLLLVAAMTGTMVVGCGSKADDKTADTKTEQTDDKKDTEEKKELADDEYQYVSAADTVIADGVHVLDVREWENYSKGRVANSEWCPIFPLEDDSLVDEMTTYAKDHLNDGKDIYVICNSGKRGAEKATAVLRDAGIEPTSIYTVEGGAEALGKENGALTTDRTEENIDWKYVSGKDAVDKVGDKDVQFLDVRDDDTYKAGHLKGTLQCSLKEFDTPEAQTEMYNLAKDKMDKDEPVYILCYSGNKCAKTAISVMKDAGFDTDNLFIIENGAKDGDVSAAFVTEMYDGGWYEWLMHDDYPVQVGDPASDECVHTTVGELSTGKAAKMKKIIYTFLDLLTIAFLIGGYVFQYFTRKKLGMLRWVNYQNMQIQKNPVYDILKYITVAAAIVLIVLIIVGYRKKKEMKNKKLWIFIGMIVLILILNHIFGWSSYLGNTENLKFLENMVQENLVLAIGIYTILTIISCVVLALPGVTFAIVAGLVFGPVLGTICCSVATTLGAMVAFVAGRFFLQDIIKPMAMKNKYLKKWLFDESGNNEVFILMITRLVPLFPYNLQNFAYGVTDIKFSTYSICSLIFMLPGTAMYTVGMAGLADKENRIFYIGIAIVLAGIVIGLGAFLKKHYVQEEKNEEMKNNNTVEACTHCHVCQNQCEFLKKYGIDIGDTEKLKELSYHCFLCGKCTEVCPENIDGREYILNLRREKVEKSGGTLEEKGYGMLLKEKKDYIYRNYRHAQGESILFPGCNFPSFYPKTTKRLVNELKKYGIGVAYDCCGKPIVELGMKEDEKRIIGQIQSELHKRKIKEVIMLCPNCYAYLKPRMEEVKVVSIYEKLEEFEIGKKNLFPAKVFLPCPDREKKELLGEIERYIEGKLIPIEEVQCCGLGGCAPVKEPELAKNMGAALKNSGGQKIYSYCASCAGNLNRNGSKNVTHILTEILETDEKADTGKSMMNRMKTKFIMKRAVIVFTRVPIPGQTKTRMMPYFSPEECAKLHENFLKDIAQECEKVNADIFVCYTPKKGKAYLEKLFRKAKEYIPQTGEGLGERMYQAIEYVLEKGYDSCVLIGTDIPELKCSDLEYAFRLLDVNDVVFGPTVDEGYYLVGMKRPVCEVFEKKTYGTGNVLEQTVQPLQEMGLTIGYVRRLQDMDDRDDITAYRSRMRTQKLLQNTHTGRYLLKKQKISIIVPIYNEETTIEKLLEQLENLQGKCEIILVDGGSTDATLSMIRPGFKVLHSEKGRANQMNLGAKESTGDILFFLHSDSELPKRPLEEIKAVIKDHEAGCFGIAFHSRQFFMWTCRVISNHRIKDRKVMFGDQGIFITRELFFKAGMFPALPIMEDYQFSLTLKEMGVKLGIARHRIYTSDRRFPKKVIPQLKVMWKMNRLRKMYRDGVPIETISKLYKDVRMERIKGLNEYVKNEKYRKALNLPNEQEEEYTMLAQGEYNINYSFTHPKTGKKLLLRVNCGSQMHLENQIGYECHALQLLEASGRTPKVLYVDGSRKFLDHGVLVMEYLPGKALDYHTDLKYAAECLADIHSVRIPESESGLIRPENPLIAILEECEEMVKIYMDSPLGKDRMKRKIRDLLDKAWKKAKEFHMEDSPYQCCINTELNSTNFLIGGEGKPNYLIDWEKPLFGDPAQDLGHFLAPTTTFWKTDVILKEEEIENFLNEYLKCVRARFDITGLKERTKVFMEITCLRGITWCAMAWVQYQQPDKLIINESTYRKLEDYLSDGFLEKIEIFLEQMEKEKIAELFMKGIDCSQVVAGAFAEELGITQEEAYKMVAGFGGGMGIGETCGAVVGAMIVLGMKFGHCDTEHMEQKDIMNAKRAEFLTKFQEKYGVCSCKGLLKHDIADPEGMQKILEEGLLFDFCPEIVRDTIEILNEVVMNDIIKDFHELTEIPVFQEMVPDKKYMDTEEHLDVLQMNIGRKCNLLCKHCHVNAGPARTEEMSKEVMDACLTFAKEQNIATIDITGGAPEMNPHLEYLIEESSRICNHVIIRTNLVILLEEEYEQLMEVYTKNKVEIVCSLPYYRAAEMDKVRGEGSFDKAIEVIKHLNAIGYGRNPELVLNMVYNPAGAFFPPDQEAMEKEYKQKLLQDFGIEFNSLYTLYNNPMGRFGAFLQRSGNLKRYMKKLFDAFNADTVGALMCRTQISVDYDGQLYDCDFNLAAGIPVVGNQKIFDVTGKPYQVRKIRMDKHCYACTAGAGSSMPVFDFNATPDEKKPAECTYTVIRSNENEATIEKPMMILDNKQCKWEHHSCGVFTNPIKRTSFEFQQEDGTVSADILKIDARFVSLLKWLGENHINVRLSGENTEEGYAVYKIREIAFGGGTKLSAEDGFLQFMIERLLASNAPAEEENDEDEDEAGDDMKLTSLQSITDFMNCAGRTLPDNIRLWARRNLAVARSHEVSPEERRHAQRALSIMMNVQWKSNYFEAIDPDEARRILDEELYGMERVKQRIIETIIQINRTHTLPAYGLLLVGPAGTGKSQIAYAVARILKLPWTTLDMSSINDPEQLTGSSRIYANAKTGIIMDAFAMAGESNLVFIINELDKAASGKGNGNPADVLLTLLDNLGFTDNYIECMIPTVGVYPIATANDKSQISAPLMSRFAVIDIPDYTPEEKKVIFSKFALPKVLKRMSLKEDECIMSEEGLDEVIELYSNTSGIRDLEQAAEHIAANALYQIEVDHVKSVTFDAEMVRNLLKMKTTRTTFFTRDKKFYKTFFRLMLVVALQNLVAYSVNMLDNIMLGSYSQNALSGAATVNQIFFIVNQLALSIGNALVAICSQYWGKQETGAIRKMTGVALALSVLIGAIVVTACTCIPEQLLRIFTTSPEIIAEGKAYLGLLKWTFLLFMISNLLIAMLRSVETVKISFVISVVSLITNGCINYTLIFGHFGFPEMGIQGAAVGTLTARMLELLIIVVYIWKIDTKVRLFDINLFRTIFLPENRKIWGAFFKVAFPIMCSGMIWAISVPMQTAILGHLSADAIAANSVSSTFFQYLKVIVIAISSASAVVIGKDIGEGDIKRVKSDGRTLSVIDVLIGIVLASLLFVLRGPLLSMYKLTDTAAVLANHFIMIMSVVMVGMSYQMPVSVGVIQGGGDTRFSMYMNMISTWGIVMPLSFLAAFVWKLPEELVVVAVQSDQLFKGIPVFLRFRSYKWIHKLTMDSQINIKRSMEWKEFETTFSVKLNQQQKEAVQSTKGPVLLLAVPGSGKTTVLVTRLGYMIYCKNIPPERILTVTYTVAATKNMSERFAVRFGEDMAKRLEFRTINGICAMIIQYYGRRIGKTPFELVKDEKATTGMLIRICQDHGMGYPTESDLKNVRTLITYIKNMMLNEEELQKLEEESDIRIAGIYREYCRQMREQKLMDYDDQMLYAYNILRKDPGVLAYFQNRYPYICVDEAQDTSKIQHAIIALLAAGTGNLFMVGDEDQSIYGFRAAYPEALLSFEKKHSGAKVLLMEENFRSNAKIVEAADKFIQKNTLRHEKHMRAAREAGADIREISLKSRKAQYVYLMKAAQECTTGMAGMSGSEEHRGRADASVTETAVLYRDNECAIPLIDLLERKNIPYRMRNADLSFFTHRTVLDVQNIIRFAMDPKDTELFMQIYYRLKLFFNKKDALRYAQISQEKDMEVLDAALKYGNLEKYQEDNIRNLKRQMVRILNMPGDEAVNQILTYMGYQDYLKKMGMNANKLETVKLIGSRVESPEKLLERLEELRTIIQEKVSDKDCPFILSTMHASKGLEYDTVYLLDVMDGILPEKVLANPRTASKEELETYEEERRLFYVGVTRAKNQLNVFTTNKPSKFCSELLGKRNLRENQQKEYAGIKKWGDYSPAGTYGIKGNGMYHGYGTGHGSQKQPGKSYQELADALGEGMVVKHKKFGEGVVVDMEGEHIRIQFGDNVKNMDLKVLARLGMLEIMIIKGGAVMNMVAFGKKVVKFRIPILIISILLLIPAGLGYVNTRVNYDVLTYLPEDIETMQGQDILVKDFGTGAFSMFIVDGMEDKDVSALKAKIEKVDHVQKVLWYDSLADISMPKSMMPKDVYEVFNSDTGTMMAIFFDEGTSSDGTMEAIGEIRKLAGKQCFLSGMSAIVTDTKNLAEKETPLYVLIAVVLAVIVLGLTMDSYFIPLLFMLSIGMAIIYNLGSNYFLGEISYITKALAAVLQLGVTLDYSIFLMHSYEEQQARYNGDKERAMAHAISQTFSSVIGSSVTTVAGFIALCFMTFTLGMDIGVVMVKGVVLGVIACVTILPSMILCCDKWITKTMHKPFLPDIGRISDKVTKRYMIYVIIFLVLLFPAIYGNNHTSVYYNLDETLPKDLPSIIANEKLKEDYDMNTTHMILVDSSVESADVAKMINKMDDVDGVKWALGLDALIGPAIPQSMIPDSVTEMLKNDKYQLLLVNSEYKVASDELNVQIKELNKILHKYDKGGMLIGEGPLTADLIDITDTDFKTVSVVSIGIIFVIILILFKSISLPIILVGVIEFAIFVNMGIPYYTGTKLPFVASIVIGTIQLGSTVDYAILMTTRYKRERNHGAEKYDAITTAHRASAQSIMVSALSFFAATIGVGLYSNIDMISSLCILMARGAIISMIVVIFVLPSMFMVFDKVIVKTSKGFLPMKKRKVIIDCDPGIDDSLAIMLALQSEELEIVGITIVCGNCPVEMGFGNAKKVLKHMGRLDVPVYIGVEKPLRREYVNALDTHGEDGLGESFLPEVEGFRQEMGAVEFLASKLKEGHISVIALGPMTNLATLLEQDRVAFDQIEEFVSMGGTFKSHGNCSPVAEYNYWCDPDAAAKVYDAMYQNGRKIHMIGLDVTREIVLTPTILEYMCRINAKRGAFIKKITKFYFDFHWQWEHIVGCVINDPLAVAYFIDPSICEGFESFVQIETEGISLGQSVVDSMNFYRKEPNAKVLTQVDTYRFFEMMLSRVLEVEPESLDILENVLMKKTSTYRVSTYKICIVAFAICINLVGGQIALFLKLPIYLDSIGTVFIASTLGPIYGMLPNVISGLFMGMTVDVYSLYYAPVGIILGLVTGLVYQKYKPKKWWIFVAALVITLPSTIVSSCITAFLFGGITSSGSTVLVQLLAKTPMGMVGACFVVQFFTDYIDRVICLFVVSALTKALPRNMMERLMNVLITGTSSGIGKGCAKYFLKNGHKVYGFDRKESTIEHPDYKHYCLDIRDKEMYPELPPMQIVINNAGVQNEDDIDINLKGTIAVTEHYAVQPEIRSVIMIGSASGHTGSEFPEYAASKGGVLSYTKNVAMRIAPYQATCNSMDFGGVMTELNKPVMEDEKLWNAIMDLTPLKRWMSVEEAAEWIYFMAVQNRFCTGQNILIDGLEAGNSNFIWPEMEFKYCKLEIFLPPTHLEVVQKALQEVDAGHIGNYDSCMSVSPVTGYWRPLDGCDPYIGTNGEISCEPELKVEVTVYTENVDKTIEAVKKVHPYEEPVINVIPLWRTSFMSERNHEVIKSQQLLDEYGNIAEPGWSRKQLQQYSRTQIKAPKFRIKEWDYYLVVGDDCAVAFTLSDDGYVGLQSVSLLDFSGEPWEHTETILDAFPMGKLRMPENSSEGDIIYEKKNLRLKYVLENSASESADTAEEEHNEKITKPAIRIRHITCQFDNFYQGKSFSCDIRLRQPDMDTMVIATPWDRKMMIFYDGIAHKIDDVEFVIPEDDYCKPWKFTSSDSRFEMDFLPILDRSACLDYKLIVSDQHQVFGRMSGMAVLDDGTKIEIKDVLCFAEKVHNRYMETKDVILELRTKKGLSQDELAGKVMVTRQAVSRWENGETVPNTETLKLLSKEFGVSINTLLGAPRKLICQCCGMPLEDDEIISHDSDGTLNEDYCKWCYADGTYTYSNMDDLIDVCVKNMINENFTEEQVRAYMKDLLPKLDYWKQYEELGDNGEFEAFKKQLIQEINDLHIEGMPKVEKLNALVGKYVNLEYPLPNGKRVKLLDDQTTYLGNQLECEFGGDRCFGVLAGMDFIMVCTYEAGGENPELVVYKKRMERYMGELSNKTDFEFKASLLLLLYNRNISNYYPRIPNMRINIFEGILIPFVGTTIGSACVFFMRQTLNKSVQRALAGFAAGIMVAASIWSLLIPAIKQSENMGTLSFVPAVVGFWIGILFLLALDHLIPHLHVGSDQAEGPKSKFGRTTMMVLAVTLHNIPEGMAVGVMYAGFLAENAQITATSALALSLGIAIQNFPEGAIISMPLRAEGESKRKAFLRGVLSGVVEPIGAVLTIFAAQLVIPALPYLLSFAAGAMLYVVVEELIPEMSQGQHSNIGTLFFALGFSLMMILDVALGMADLDYDGINSPSRGVIAVVPDFESFKVKLIVADDYAKYSTDFPILENIENREYYGRSASQIKGEIPIQIHSASTIEGKTAILSDSEQGLMALIYGKDGLSGIPITEMEKGIVGVENDYVYYLSFQFGGNQSFMDLIKIGKYIAEKRKALGLTQKQLTEKLNMSDKSVSKWERGICLPDVSIYMELCSILRISINEFLAGKDIDAENVIEKSDSNLIQITKESKKKQKNLKTILAVVTVFAVIVSAILGTLFFHKLIQPKNYITAVDQTSTEMKTTELLSMKRKEEKADIYAWIDGEEPMEKKRGIDSFTLHILAMLFMLCDHLWATLFPAQEWMTCVGRLAFPIFAFMIAEGCYYTSNVKKYMLRLFLFAIISEIPFNLIMGSSVFYPFHQNVLWTFLLGVLSIQIIEKAKKKQKKWISFFVVCLVLLMDFLLGTITMVDYNAAGILTVLLFYFFRKKTWISFAAQLVGLYYLNVVMLGNLYYPVTILGHHFEIAQQSFALLALIPIWLYHGEQGYHSKWFKYFCYAFYPVHFLILFVIWQWRIRMQTYTYVSKGKFELMEKPKPVLMHERDAIVKVTLASICSSDLHIKHGSVPRAVPGITVGHEMVGIVEEVGTAVKNVKSGDRVTVNVETFCGECFFCKKGYVNNCTDENGGWALGCRIDGGQAEYVRVPFADQGLNKIPDKVTDRQALFVGDVLATGYWAARISEITEDDTVLIIGAGPTGICTLLSVMLKNPKRIIMCEKDEKRMHFIRKHYPEVLTVSPEECFDFVQANSEHGGADVVLEVAGAESTFRLAWECARPNAIVTVVALYDKAQTLPLPDMYGKNLTFKTGGVDGCDCEETLRLIAEGKINTEPLITHTYPLSRIEEAYELFENKRNGVIKVAVECMVGKGTITMRETRILEFKETITNTFLKTVSAFSNYNGGTILFGVDDNGNVKGLLDVKQACLDIENKVNDSISPQPNYTLEIQNNDQTIKLTVKSGLQKPYLYKSKAYKRNDTATIEVDTLEFSRLVLDGKNISFEELPCKDQELSFEILQCKLKENIYIETFNQDTLKTLNLYDNINGYNNAAGLLADKNHFSGIDIVKFGENISIIQKRVTFEHISVLEIYEKALAVFRDYYQYEVIQGADRKMVEKIPEAAFREAIANALIHRVWDINSHTRVSMFDDRIEVVSPGGLPAGITAEEYLSGKLSILRNRNLANVFYRLGLVEIFGTGITRIKQLYAESLIKPEFEVSENAIKIVLPIFETNVNLTEDEKVIYKFLSKTMLKPISEIAPYVPFGKSKTTQLLKAMEKKGVIAVEGKGRGTKYIIKMNPLGKSLIEFYGEDTDQIVEDLPVDRKYKFKSGVNIMFGCNNFCSYCIVPYVRGRERSWNPEEVVIDRFDRLLAQVQEIARERSSRFEGTVQEVLVESVNDQDASLVTGRMGNNLLVHFPGDAYMIGTFKQIHLDVCKGFYYMGTPAEMGKNTTNDMTQGNCMRLLVQFFLPILAGNLFQQLYSFADSMVVGKGIGDTALAAVGNTSSVHFLIIGFAIGLTGGLGICISQSFGSGNYEKLRKELAMSVWICLAIGIVITVVSLAFMRQLFTFLHTPEDLMTETLQYFGTILAGTTITIFNNFAMTLLRSVGNSRVPLVAMIISAIANVLMDLLFVFPLHMGVFGAALATVLAQVLSALYCCYYIGREKNLIPKKTDWKPQSVIIKRLTLKGLPVAVMNSVTAVGGMVLQTFVNNMGTSYVAAYAACTKILSLFEQPANTVGLALLTFVGQNYGAGKKERIRTGIREGVILTILINIPLALMLLCIPEFLTSFMLNDASIISYTRDFLAFTGICLFPLGWLFVFRNGCQGMGHTFVPMLSGVLEVSLRVVMVKLLTPYLAFRGVALAEVSAWIGAWIMLMITYWIYQERTDSFRMAKHYDKQFPSNAEKRRESVKAKIKDIYDQSRQNYGAPKITQVLRKTGETISVRTVGQYMKQMGIKAQWVKPWTITTRDSDFSSKLQNILDEQFNPERPISIDSFAPRMTKKQTTKTKKESVLYIEDITHFLTHKVIEKIFSFMRRNENQLNIKMCKNVEKMKPILNIENLTKVYGTLPNQTRALNGITFQVMPGEFLGIMGSSGSGKSTLLNCIATVIQPTGGSIQVEGDTLQSLKEKALAEYRGKKVGYLFQNFELLDNLTGRENILLPTSLHGVAETESSQRLKQLADYLEISDVLDKFPSKMSGGQRQRVAAARALILHPQMILADEPTGALDSKNARSLMEKLSGLNRDEQATILMVTHDSNAASFCKRILFIQDGVIFHELRRGDESQQEFYGRILKVMAQLGGGSANVLMFSNLILRNSRRSRKENGLFFSSLVISIVAFYMILSISTQDVMLFLQKMESDAVDKLLLLIPAFYGMTLGILFFLIYFACKYQFERRRHEFGVYLMLGMRRSKLFGMLLAEDFLTSILAMLIGLPVAVVLSEIVSLVTAKLVGMGIIGHQFSLSWFAIEWTLAGFLAIKLTALLILSGRISRQEIGTLLSQPTNRPKKQMPSVIYGLAAICGSVMLAVAYYMAIQGIAWTKVSMMGLTLLLGIVGTMLLFYGMRALIALIVKKGKGNKQLHVFTFRQIQENVIHQSNSMAISSLLILAALCCFGAGVGIAGTNNLSSGHVIDYTFEDHTAEDSSQVLPNIKAVLKENSLENQFSELFEMRVGRIRTTEDYDNAYSMDAVMDSLRSLPQSEDRDVLLNNLGYATYPYLICLSDYNRLLELSGNPALQLGEKEAAVYIDTEFTTVSRTAMLNQVLAGHPKVELDGSPIHLTGEVQSVNLVTDRSITLSFALILPDEAFLYYSQGMYDTYVNAVLSEQALNGNSLITAYLDLNEKLDETDIEYESYLQNMGRQLFYTIASSYITLYLAIVFLVVANTIVGVQFLMSQQKTGRRYQTLIRLGATYETLCQSAGKQITWFMGLPVLVAAVSSLFGVRALFTGILSSRTRGTVAEMMFVSAAMILLLCVIEYIYMRVVKRSSDRYLLTLMQPQREEMKRIAVVEDEVYMREELCNMLQKDGYLAEAITELEDAARLLAALRPDLVILDLNLPEISGFQICQELKNKTAIPVLILTSRDQVKDELQAFHLGADEYLTKPCRKDRLLARVSNILKRYEGRTNLIEGPDFLLDQQTYTLYIHNTSVVLPKNQGKLLVALLSGGDALVTTEQLCIALWGTTEYIDENALQVNLTRLKKTMSGLEMKQRIVAVRGMGYRLETGVAPMKRLWRMIERYYPWLLLLLGVDCFCAIILWISDIQAFQTLSGLVVLTSLLLFSAILFVLNKRETTRRELFRDFLSDPTICNEERLLSAISREEGESIRLLASVLQEHKTESNSMADALQDYEEYVEGWAHEAKTPLSLLTMLLDNRSNEMSPPLQAKLDYVRSQLQEDVTQMLYYARLKSSTKDYQFKDINLNDCLGEVLEDYAPLLEEKQFVIINKLQSETVYTDRRGLQFMLGQIVSNAIKYSSDSPMLTISMIHSEIADVLSVEDNGIGVKKYDLPYIFQKGFTGDSTDSRKKATGIGLYLVKKMADDLNLCLEAASPWEKGFKIVIFFPKLKSNGGKMIFTMYKKETADKKHHTNPYRAVNYIRDENGNPICPNGRKFLFKRKQHVRYKKYGRTEEIYPSLLSVPFLHKTVTIFKKHILMMKYEYMKESEQMLQYFQFPKFLLKLRISQTAKFLYMILYDRARISRKNSWIDKYGNVYLIFPIEELSAQIGKCKSSVKTALKELDDVGLLVRRSGGFSKPNHLYVKIPSDEIGLQLVENKAVEKMVATESEKQPSSGRKNGCAGVGNVAPSKVTEKYKRNKYHEVNYCYGEGESLMREEDTVCVGSDGLQYCKVCGEAKEAFFPEGGFMGMKKHSRQCACDRKAYEEEQKYFKDKEHRELVSRNTSICFDESRMEEWTFENADMSDTVMHRAKKYVDNWEEMKRNHIGCLFWGPVGTGKSFIAGCIANELLKQEVMVKMTNFNTIIDDIFPLADKTEYINALASYQLLIIDDLGVERNSEYALGIIFSVIDRRIRSGRPLIITTNLPLKEIKNETMLDKRRIYDRILEMCTPMYVGGTSKREVIASMKMEKAKTLLNTNRGEEDCEMNHTEKTIPVWEKYSLNVSEAAEYYGIGEKRLRQIAGENEGADFILEVGSHIRFKRKLFEDYLDTASTVMSEKRRDHRGRILHNGEIQLSDGRYRFKYVDEMGKERCVYSWRLDHNDATPKGKRRTLSLREMEKKIQADHFEQIATNGGNMTVLELVEKYISTKTGVRPTTVAGYGTVINLLKKDPFGKRRIDTVRISDAKCWLIHLQQVEKKSYSSIHSIRGVLRPAFQLAVDDDLIRKNSFQFQLMEVVVNDSVTREAISRAEERKFLRFVKEDPHFCRYYEGIYILFKTGLRISEFCGLTISDIDFKEHTINIDHQLQKKSKIGYYIQETKTTSGTRKIPMTADVEECFRKIIEKRNPPKAEPMVDGKSGFLYFDKNESICYSLHWEHYFQHIIQKYNNTYKVQMPVITPHVCRHTYCTNMAKSGMNPKALQYLMGHSDISVTLNTYTHVNLEDAREEVARIQVVMIKVLFICHGNICRSTMAEYVMKDLVKKANLESSFYIDSAGTSNEEDGNPVHYGTQNKLREEGIPCGNHRARQMTRKDYEEFDYLIGMEQWNIRNINRIIRKDPEQKVHLLLEYAGDARDIADPWYTGNFDVTYEDVKEGCEAFLQYLIENEPLYMMFPRRYGLIVTKVYAAYIKSMLNLCKIVPGVYITLNSMKLFSKKCKGIIKCIQNYLNTMNEKLQIIFGLLGGLAVFIYGMNMMSECLQKAAGEKMKSILALLTKNPVLGVIAGALTTAVLQSSSATTVMAIGFVSAGLMSLPQAISIIFGANIGTTMTAQIIAFKISDYIYIIIFIGFIISFIAKSEKVKSIGQTIFAFGLLFLGIETMGDVMKPLASSPVFTNLIERVAHIPVLGVFVGTLMTLVVQSSSATIAVLQNFASQPGPDGVTSMLGLAGAIPILLGDNIGTTITALLASIGQTKDAKRTAVAHCIFNISGCLLFIGFVKPFAALIQHISPKGPEVEVISRQIANAHTLFNITMTLIWVCLIKFMVKIVMTLIPDGKAVDMDSAKPVFLDDKIINQPAAALQLVAKEILRVSEMVKVVVADTITIVKTEDMNELEPLQEKGLQIKKLTDQITEYLAALFSAGTMTEQQAAQTASLMYILSDVERMGTLSVEVAKCVQEKIENRYKYTPEAMEELQKSLKTLEKMFTDSIKALQGDKSVQTEKLIKRKDKIMDLDLKMRKAHVQRVNKGKCKASLTTPFTNILHLIDRMGNSCVNLADVASNEISLKYFMVNMDTSTYEILKECNSGCRMALNSIEQLAVYLKSQELQDLFCKYKEDYEKMEKESIRLSEGKMQEEKLSEKAAETFAWISAEVKMMLNDDSSKIAEMMIDGANMGIKSITEKLNRYPEAEKESISLAKKFEKTCEKLIQDMKKYLMKDISEKRLSDYMAEQIADEILSGRIPGGSQLKQEELAEAFEASRIPIREAFQILENQGLIIRLATRRITVTELDKEQICLIYSMISEMTKKALNSLKHSGKTAQLEELLMTSGLSGEVQPAEAMCDLVENEYIKRLLRNASDSYIRFALSTGHYADKIKEEKDKMTELLENGELKKVEKSLDVYFKLLARAVNEERGMNEMNGLKPIKMPSAKEKVAAELRKAILSRQMKEGEVLSLESVATQLNVSAMPVREAFQILARDGLIQLRKNKGAVVLGITETYIKEHYQLRAILESAAALLAAEPETDISEIESVYEEAEEALKEGNLKQYTDLNRAFHHEIWSAAGNQKMKNMISELWNGLSMGSMVSEEDYAKVSIKEHERIWRAIKAHDQKEAQMAMYDHIMRSRDDMLTYYKMSQITITLLFLAFAIIMFMLEKIPLGVTSMIVCVGLVVTGVLDWQVAFSGFIDSNVILFVAMFIVGGALFETGMANKIGGVVTHFAKTERQLIVAIMVIVGAMSGFLSNTGTAAILIPVVIGIAAKSGYSRSRLLMPLVFAAAMGGNLSLIGAPGNMIAQSSMEKIGLKFGFFDYAKVGLPILIVGIIFFALFGYKFLPDKVDTSSEGIFDETKDFSNVPKWKQNLSLIILLLTLLGMIFEEQIGIKLCVIGCVGALALIVTGVISEKDALLSIDLKTIFLFGGTLSLASALEATGAGELIADKVIGMLGDNPSPYILTFVIFMLCCIMTNFMSNTATTALMAPIGVSIAQGMGADPSAVLMACVIGGSCAFATPIGMPANTMVVTAGGYTFKDYAKAGIPMIVVATIVSMILLPIFYPFFPMSKEQQVTQLTDYMAKFIAHIAKKLPDDVIEKLTELREKEDSPLSKVIYDTMFKNQELAVKLNRPSCQDTGVLQFWVKCGTKFPLIDELEGLLKDAVVKATFEAPLRHNSVETFDEYNTGKNVGKGTPTVFWDIVPNSDKCEIYTYMAGGGCTLPGKAMVLMPGEGYEGVTKFVMDVMTTYGLNACPPLLVGVGVATSVETAALLSKKALMRPIGSHNENERAAKMETLLEDGINAIGLGPQGMGGKYSVMGVNIENTARHPSTIGVAVNVGCWSHRRGHIVFDKDLNYTITTHTGVELMVEVKNGKKILTTPISAEDLKDIKIGDIVYLNGSMTTCRDVAHRRLVEEGRELPVDVRNNAIFHAGPIIRPLENDKFEMVSVGPTTSMRMEKFEYEFVKETGVRVIIGKGGMKENTERACKEFGAIHCVFPAGNAVVAATEVEEIVRAEWRDLGMPETLWNCRVKEFGPLIVSIDANGDNLFEERKIEYNKKKDAATEEICKHVSFIKMLYTIPDYYHEFSCIAGECEDTCCAGWQIVADEAALKKYKKVTGSFRKRLRKSINWKEGTFKQDRNKRCAFLNDENLCDMYTALGEKSLCRTCKMYPRHVEEFEDVREMTLSVSCPEVARILLGKKEPVRFLTYESNKEEEYDDFDPFLYSKLVDARKVMINILQDRSKRLDLRVGLVLAIAHDLQVRIKREDIFSIDDVFEKYQTEKAVQFVEAKLSEDENYAFIKKMFRNQYLMERLRDDWEPHLLEAESLLYGDIGCSDSEEQCTKYKEQYTKNKREFHEWLNTYMPDYEIQYEQLLVYFISTYFCGAVYDGEAYVKVQMAVVSVLLIHEFLLAQWLKNEKTLEMEDVIDTVYRYSRELEHSDPNLNLMEKLMRRDLLSWFKKENDGDKEMDRHMLLSVALILLCGMGMSWICKKLKLPGLLGMLLTGIVLGPYVLNLLDENLLNISSELRKMALIIILMRAGLGLDISGLKKIGRPAVMMCFVPASFELLGMLVLAPRLLGLSVLEAAILGSVLAAVSPAVVVPRMVRLMEEGYGTEKGIPQLILAGASVDDVYVIVLFTTFSGIMQGKSVSVMSFLNIPISIILGMIIGLLAGWLLARYFEKVHIRDTVKVLILLSISFLLVVAEDHMTTAITFSALIAVMFLGVGLQKYREVAAKRIAVKCGKMWVAAEVFLFVLVGATVNIGYLSHVGLKAVVLICGALIFRMTGVFVCLLGTDMNGKEKLFTMMAYTPKATVQAAIGGIPLALGFACGDVVLTVAVLAIVLTAPLGAFAIDSSYKKFLAKTKMTREEAWELLTEYNQDEFHLLHAQTVENTMRYFARELGFADEEDFWGIVGLLHDLDFEKYPEEHCIKSQEIMKERGIDEKIIHATASHGYAITVDIKPEHEMEKILYAVDELTGLIGAVVLMRPSKSVQDLTLKSVKKKYKSKNFAAGCSREVIERGADMLGWTLEDLIQRTIDALKTFQDMKISTKGRYALRIMIDLAENANGEYIRLKDISARQGITLKYMEQIMPMLTKAGYVRSYRGNNGGYMLAKEPEEYTAGDIIRTTEGSLAPIACLDDVPNRCERQDQCSTLEFWEGLKKVIDQYVDSVTLADLVNNHEEKCGKLDLMDIRNMSEDDLLDMDYFLNEDNLFDDEAGVEGFYIFMEHLETSKDEDAKTGHKTADTSFWGCKTHIAMTEERIITAATITSGEKIDGKELPKLVQKSKAAGIQIESVIGDMAYSEKTNIEAAKKGGYELIAKLNPVITQGNRRKEDVFEFNKDAVASIEVSTNGELLSFLPLVTTLMKEKFPDKNTDDSLEKELKYCKQLIDVIKGNEEICSYPKVQEKLKSTRRICHMEIYELIIPKDNLLRQIKELVDFSFIYDALLANYCLDNGGNAVPPIRIFKYLLLKSIYDLSDIDLVERSKYDMSFKYFLDMAPEDEVINPSSLTKFRKLRLKDMNLLDMLIAKTVQLTLEKGIIKSKYIIMDATHTKSKYNQKTPPSSTPGTIKKTAPMDSCDFYTTLGKKLRARRRTKHMTLSDLSKKLNKSVATISKYEKGEVLISIDTLVDICQILNIDIASLLPITSTDKSAAEIARYQNYFSDKLYLYWFNGEKNCLQKAVLENKNLSLTATMYYDVDDISNYYEANYIYEGDITYSDTCTVFILVNTKPPFDILTLRLPSIGINSMHVVGLISTITYFYQSIAMKVIASENPLPLNDELKNALHISSDELKNIKRTNFFFAQMNREQERAKRRPEKNPVVEYNKIQNKYYPELFAKFAEVNDPRNQSYIEYPVRVMLGTMYYKCISGISSMQEMTLKFNDDAVVENLYSFMSEEKKEYLPHGVIENEFLARLNPEELEKIQKDIAYSMIRRKTFDDARVLKRWQIIIDATELDEGYQKKNEYYLSRCYNRGEADEFTKYHRSVLEAKLYLGNNLVCSIASEAIQNSEEYINQSEKKIKQDCESKAFIRVAEKIKKQFPRLPIIITADGLYVSQKVIQTCTDNSWNYIIRYKKGSASSIAKEYQSLPEKEKIGSEIEYQNQIMFQNTDVNLTYYTEKKIKPDEKKETTEFAWIADITITKNNARKIVNAGRNRWKIENQGFNRQKHWRGNIEHACSWNEQAQKNHYLMEQIADFIKQLYEYYYLKKNEINLPFKTNKNFAMSKEAKVGYKKNIGTILLLSFAGSIIYGLPYFRSYYYDTYQAMYHLTNTQMGLLGSAYGVLGVFSYIIGGVLADKIKAKKLLIFSMIATGLGGLLHLFVNNFYALVVIYGLWGVTSLLTFWPALMKIVRIQATEEEQSRAYGTFEGGRGVFNAAHLAVATAIFGIFQRKAMPTLGIKGIIWFYSLAPLIVGIIFIFLLKEPETVKEDGTSSTVSFKDIIRVLKMPVMWLIIIMMYTSYTFNMSSYYFTPYASNIIGVTAVIAAILTVMSQYIRPFAATLGGFSGDKFGRSHTMIVGYILMIAGVVIMDVTGKMASDSRMILVVAACVLVYAGMFINFGLYFSFISEGGIPVELGGVAIGMASTFGYLPEVLSYTIAGKLLDTYPGYQGYHLNFLYMIAMGVIGLIVAIIWTKKYGKKKADATEAMAKVESTVKRVMARDEFPYEWDVIENEWITMSDGCRLSARVWHPKTDKPVPTIFETQPYRKRDGMRGRDEPMYGFFAGMGYNVVRVDMRGAGESDQCFYDEYLKQEQDDAVECIEWIAEQPWCDGNVGMMGKSWSGFNSLQVAARQPKGLRAIICVGFVDDRYTQDIHYKGGCLLNDNFWWGNIMLAYMCRAIDSEIKPDTWKEESVKRLEEMPLWPANWMEHQTRDDYWKHGSVSVNYDDIKVPVFALDGWADSYTNSVLTLMEGLSVPRKALIGPWAHVFAHDGMPQPAIDFLGEATKWWDKWLKGVDNDTLDCPMVQVWLEDSMEPETVHPLSDGRWVALDGWPSKDVAMKTLSMTYGHLQDEANTKKEIVDLCTLPNHGLLANEWMGAGVLGESPADMRVDDGMAMVFDSDILEEEVEILGYPEFEVEFTCDKPNAFMYAQLSDIHPDGASTRVSYGLMNLTHLEGHDKVVYLEEGKTYKAKVQLDVCGHNFPKGHRIRLSIANSFWPMIWPSPELATLKLDLSTAKFALPMFSGKDAEGPNMEARCAPLTPMTTLSPGRVDRTIEYDLLTDSWTSITNGVGGVFGEGIYRFDDIGTVVEHNLKRELTMSNKDPLSAKYTITQKMKNGRDGWLTDCDIVVTQTADKDNFYITGHMDASINDEHVFHRDYDYKVKRNGIMKEKSITFWELVLMNVSALYGIRWIAKSTSDSFGLGLGAIPMWIIFMLIFFVPQALMCAELATAYPTDGGLNDWVKIAFGTKYGFLVSWMHWTALIFWYASFLTFFSINFTYMIGKPELADNKILVLIMSLVVFWALSFASMRGMKFGKYFTSVGALGSVVPTVCLIGMAILAVVVFKKAPSASEYTIATLTPKLNMNSLVAISGITFAYTGAEFTANFASEMKNPQKDYPRAIMIAAGTICVLYVIGSVCMTMLMPTSEIFAYTGTLDALVIACNLLEVPQFFVQIVAFGITLSIFGAVVLYIAQPTKMLFGYSEPGIFPEKITKKNEHDIPEKAILFQAILVSLLLAGVAVFPAVETIYNVLITMTALTSLFPYVLLFAAYIKIKRKKVDKPGLYQMTKNKKWGCFLGYMELVICVIAIVCSALPVMTTFKENVVYEVEMIGGGLLVIVSGLWLWKRSGLKNKTFEIEMIGLKENSQKTDRKGTGIMKENRYELNKQLAQMLKGGVIMDVTTPEQAKIAEEAGACAVMALERIPADIRAAGGVSRMSDPKMIRGIQEAVSIPVMAKCRIGHFVEAQILEAIEIDYIDESEVLSPADDIYHINKKEFKVPFVCGARDLGEALRRIAEGASMIRTKGEPGTGDVVQAVRHMRAMNAEIRRIQNLRADELFEAAKLLQVPVDLVEYVHENGKLPVVNFAAGGVATPADAALMMQLGAEGVFVGSGIFKSGNPAKRAASIVKAVTNYTDAKLIAELSTDLGEAMVGINEQEIELLMAERGKMTIAILAMQGAFLEHGQMLDRLGVEHFEIRKKEDLDRSFDGLILPGGESTVMRKLLIELNIYDILKKKIEDGLPVFGTCAGLILLAEQVEDGVPCFGTMNILAKRNAYGRQLGSFYIEDEMKEIGKIPMTFIRAPYIDDVYGEAEILAVVDGKVVAARQGSQLATAFHPELNDDTSVHAYFVEMIKGSKAQAVMAVKLIDELQKEIKAAGEAVKQEAYEKAYDHVFQILDNLEKLLNDNRYLEGNEITEEDKRLYDILIRFDAVYYFKQRLNRKALRDYDNLWNYAKELYSIPEYKEFADFEKIKQEELLGTKEENPYQIVGLGPDESYWNEPNNRAEKFAMANIADDITELVGNTPLLRLHKFEKEAGFEGKILAKLEVFNPTGSVKDRIAKNMIEQAERDGRLKPGGTIIEATSGNTGIGLAAIAAAKGYQAIIVMPDSMSKERIRILEAYGAKVVLTPGEKNMGGANEKAAEILEQTENAIITGQGGNPSNPEAHYQTTGPEIWKDTGENVDIFVATVGTGGTISGTGKFLKEKNPDIQIIGVEPAGCPVLSGGEAGPHKIQGIGGGVIAPVTDVELLDEVITVTDDEAYETVRKAARKEGSFIGISAGAALFAATEVAKRPENQGKTIVTIFPDSADRYLSTDLFEMAEFDYEVVNGRKIRVRPVETVSEVDENGYFVRQPNHFTEGFGEGKNPVEAGRYRLVWAKLCHWSNRASIVRELLGLDEAISVNMVDHAEHEKNLGWEFVYDKDNVDPVLDIQFLSEAYYKADDDYTGRTTVPALIDVKTGKVVNNDYHRLTNYFEVDFKPFHKKNAPDLYPEELRKDIDEMNDWLFDNINNGVYKTTFCRSKEAYWDAYNSFYAAIDLLEERLENRRFLFGDYVTDSDVRLYVTLARLDIRYTHQLGHTKRPLFTYKNLWAYARDLYQIPAFKNNTYFKDFANPDNKKQGRTFESFNARFLDEIDFDAYWGAPHNRARLSSDPGNKFRTEKQDMAEHEYYEVNGRQIRVRPTESGQEIDEYGNFHRQPNHFTKGFGEGENPVEADRYILFWGKGCNWSNRASIARELLGLDKVIKVEIVDWGDYEKPLGWEFVNSPNHINKETGAQFLSELYYNADDDYEGRTTVPALVDYKEKKVVNNDYHHLTNHFETAFKPFHKKGAPDLYPEELREEIDKLNVWLFENVNNAVYRAQFAESLQAFKDGYETFFAGLEAMDKRLENQRFLFGDYITDSDIRLYTTLARFDYSYSRNIGPCVHRLVDYKNLWPYARDLYQIPAFRHNTYFKDFAASEDLTHAPEDYWENVYYDIVVQETDWDTIWSQPTGREALSKDPAHKWKAEKMEAIRVTDKEWEIAGVHYVRTEAMCNGFGVSLEMEFGEDKAGDEYILVLDGIHPVSTCRLHQLDENTGKIERVATLKKYRGQHYGAAAITAAEEWFAERGVKKIFINSRTEAVGFYEKLGYVADPKQITGTGAFQCIMTEKQLMKRNKLVSIAAIIVALGVLATGCAGGSGSSKSDSKSSSGTKTVTVKAGTGANVKPYTYVGDDNETTGYDVEVLKEVFDRLDGYDLQIEVTDIPSVFSGVTSGTYQIGVNNFSYNEERAKSYLYSYPYDKIGYVFVTKKGAPEVKTFADAAGKSFEGQSGVSVTTAIESWNEKNPDKKIDITYTDADTAITLQHIEDGTTDLAIIDVAMYNAYQKEYNYDIVANQISDDDAKAIADNSYAYYIFPKDQEELRDKVDEQLKELKKDGTLSKLSQKYFGQDTAPEDDQFEKTPNMSNLFDIKMVFTQIPDLLTYLPVTLELAVVAMIVSLILGLILALIKMKKIPVLKQIANLYISVIRGTPVLVQLYVTYFGIPMILKAINLKYGTNYNANGVAPIIYAFIALAVNESAYNAEVIRASLESVPKGQIEAANALGMTYFQALRRVILPEAIVVALPSLGNSFIGLIKGTSLAFVCAVVEMTAAGKIIAGRTYRYFEVYVSLAIIYWIITIIVEQGIKLIEKKIRIPENAPAIQTDEGALNQMIEVKNISKKFNNNVVLNGIDLNINKGDVVAIIGPSGTGKSTFLRCLNRLEKPESGSISIGDLSVDLARSDKKSLVELRKKTSMVFQGFNLFSKKTALENVMEGLIIVKKMDKKKAEEIAREQLKNVGLLEWANHYPAHLSGGQQQRVAIARALAMEPELLLLDEPTSALDPELVGEVLDTIKKAANEGYTMLLVSHEMNFVKNVATRVIFLENGKIIEDGPPKEVFNHPKSDRVREFFAKINRMVEPEYSIMRISSDKWTGKEVDKSGKFVRQKNRFDTPFGEEEGQLPVEAGRYRLLWAPVCPWAHRSIIVRKLLGLEDVISVGKADPKRPNVSRSDWAFTLDEGDVDPVLGIHYISEVYLNADPDYQGRFTVPALVDLKTKKVVNNDYFHLTLYFETAWKKYHKPGAPDLYPEELREEIDALNDIIFKEVNNGVYKAGFARNQEAYEEAYHTVFNRLDWLEERLADRRYLFGDKITESDVRLYVTLTRFDVAYHNIFRVNKKRLRDYDNLWAYARDLYQTPGFGDTTDFAAIKKHYHIDCNPGNIHQIIAKGPDEEAWLLPHGREKLSEKMYNILEKVFFGDTLVLKFRNIQFWNDLIIGGVKYMYEQDYIIRMNNEVIRTMVKLLLNKDTGVSVNISEGTIKSENKKMLEAANGQSGIDNIKKMEEEILTLVDADKEGALEKALVFYGYLNELTEDALLSKNYSHEKIKKGLKIIAEHYGILNVIDLIYRMSKIYKGTLGLIGNTPLVEVVNIEKELGLEATLLVKLEYLNPAGSVKDRIAKAMIEDAEEKGILKEGSVIIEPTSGNTGIGLASIAAAKGYRIILTMPETMSVERRNILKAYGAEIVLTEGAKGMKGAIAKADELAKEIPNSFVPGQFVNPANPAAHKKTTGPEIWNDTDGAVDIVIAGVGTGGTLSGIGAYLKEQKPEVQIVALEPASSPVLSEGKAGPHKIQGIGAGFVPETLDTKIYDEIYKAEADEAFETAKLLAKKEGVLVGISSGAALAGAIELAKRPENKGKTIVALLPDSGDRYYSTPLFTEMSEKITRENRELKFETLQLHVGQESPDPVTDARAVPIYQTSSYVFRNSDHAAARFGLADAGNIYGRLTNPTEDIFEKRIAALEGGVAALAVASGAAAVTYTIENLAQNGDHIVAAKNIYGGSFNLLEHTLPQYGITTTFVDIFDYDAVEAAIQDNTKALYIETLGNPNSDVVDIEKIANIAHAHKIPLVVDNTFATPYLVRPIEYGADIVIHSATKFIGGHGTTIGGVIVDSGKFDWEASGKFASLTEPNPSYHGISFTKAVGPAAFVTKIRAILLRDTGATISPIHSFIFLQGLETLSLRVERHVENALKVVEYLNNHPLVEKVNHPAVSDDPEQQALYKKYFPNGGGSIFTFEIKGDAQKAKDFIDNLELFSLLANVADVKSLVIHPATTTHSQCTEEELLDQGIKPNTIRLSIGTEHIDDIIQDLDEAFKAVEMKLSMKSRYGLRALIDLTINSKTEQVALNSIAERNKISPQYLEQVFASLRKAGIVKSIKGSQGGYFLSRPPQEITVSSIIEALEGDYRIEDEELPKEGKYTGSVKAIQKLVIDRVNDSVTEILQSVTLHDLEKEYQEYIDYGQDMYYIMKTITIEELLQLDQNTITVLDVRPADAYTRGSVPGAVSIPLAEVEERMEELPKEKPVYVLCHTGEWSVDAVYELEAAGYDAVNIEGGYRSFLRKKLSEFVQDENTTGEKQKEIERSIIKKFRKGIWRKFTKGIREYDLIQDGDKIAVCISGGKDSMLMAKLFQELLKHGKANFELVFLVMNPGYNEDNWKIIQDNAKVLGIPLTVFETQIFDTVADIDKNPCYLCARMRRGYLYSHAKELGCNKIALGHHFDDVIETILMGMFYGGKVETMMPKLHSQNFEGMELIRPMYLIKEDDIIAWRDYNQLNFIQCACRFTENCVSCGGGRGSKRDEMKELIKEFRKQGDIIEKNIFRSVHNVNLRTIIGYHKDDMEYNFLDDYNERGKMNYGFETRCIHGNGTDEKTHSYGSVAVPIYQAATFAHPGIGQSTGYDYTRESNPTRTELEHTMSALEGAVDTVACANGMAAVGLCLELFDRGDHILCTDDLYGGSVRMFESVGGKRGLEFSYVDTADADLVEAGIRENTKALYIETPSNPTMRVTDLRKMKEIADKHNLKIIVDNTFLSPLFQRPIELGADLVIHSGTKFLGGHNDTLAGFLCSADEETAKKIRYIYKTVGSCLAPFDSYLILRGIKTLSVRLRAQQDNAIKIANWLKGHEKVKQVYYVGLKEHPGYGVNASQASGFGSMISFKVDSEATARKLLESVKLIAYAESLGGVESLITYPMLQTHGDLPVEVREKLGITEDFLRLSVGIENADDLIADLEQALAMKFDFDKVVDRHGTKCLKYDFAKERGRSDDMLPLWVADMDFPTAPGIQKGLSDAVAHGIYGYSEGKDDYFQAAAGWYEKHFGWKVEKEWLIKTPGVVFALAMAVKAYTKEGDAVLLQQPVYYPFSEVITDNHRRLINSPLQQIDGHYEINFEEFEQKIVEENVKLFLMCSPHNPVGRVWKEWELRKIGDICLKHNVLVVSDEIHSDFTYGENIHHVFASLDEKYAAITTTCTAPSKTFNIAGLQISNIWISNPELRARFRAEVTAAGYSQVNLMGLVACQAAYETGEEWLKELKIYLEGNLDYVRTFLKESLPEIKLTEPEGTYLLWLDFKSLGMKEEQLKDLVENKAKLWLDSGAMFGPDGEGFERINIACPREILKQALTQLAESVHDRMTGIDGKNVRMFDLYYCDQEYEQKDIIRVLDQPTCCNRIVPWKYFNKTALNMYSLGPYDGREAVILFNEKTRLTEEETIEYFIMNEEIKNEIQKLKKEKDAVILAHYYVDGEVQEIADYVGDSYYLAEIATKVPESTIVFCGVSFMGESAKILNPKKRVVMADGHADCPMAHMVDVDKIREVRNEYPDVSVVCYVNSTAEIKAESDVCVTSSNALKIVKNLPNKDIFFIPDENLGRFVASQLPEKHFIFNDGFCHVHTSIHKEELQKAKEAHPEALVLTHPECTGDILELSDFIGSTSQIIDYATKSENNTFIICTEMGVFYELHQKNPEKKFYSVGHRQFCPNMKMVRLEGVKEALETMQPEVNLDEEMRQKAALPLEKMLKLAAQMKNNYFNCFLFTNNRGCDLIKKKTGIIKPEGEIVKERLFITPEYTTAKEIKKIRKELHLTQKEFAEFINCSKPTVERWERSEDVIRGPIVPFLKMLQKYPEYEQEVKVPEKVWPLRIWYMYDQDVCTLIDVNERERKVKIKNYTDKIMFRAFGVMEEPDYNQYIEFLESRCFPESRDKMKLILKDLGLPFYDPIMIIEKTEGRMAEDDFWIRIERMIELFGQNIRTNRRQSSKGNQLKWENDGIWYKADYTGYEGLAEYMISHLLKKSTLAEQEFVYYDLEEIKYGMVIYNGAKSKNFLNEDWQIITLERLFHNFFGESLYKSMYRIPDHEERLRFLVQQVERMTGLQNFGVYMNKLLTIDAFFLNEDRHMHNIAVLMNGKGDYAYCPIFDNGAGLLADTTMDYPLAGDIYTLMEKVQAKTICNAFDEQLDISESLYKMNLKFRFTKKDVTELLENAEGYSDEIRKRVETIIFAQMRKYPYLFSKTMINERIEIWKKEEYHYPAAHGFIPVMFSYIHEDEKKHPAMIIAPGGAYREVSPSEAHLPAMEFYGAGYNVFVLEYTINQLDEAPLKMQPLHDISRAIRMIRSRAEEFHIRPDRIAACGFSAGAHLCGSLCVHNKDVEDPEEAYQNISNRPDVAILSYPVITSGKYAHRDSFVALFGKEPSEQELDYMSLENHVTKDTPPCFLWQTVTDQTVPVENSYLFAQACAQAGVPFAQHVFSEGIHGLSVATEEWLEQNIGQEEGKRYTQEQVKMLAEAIEAGETPFPKEKGEELLVKFGIGRKKPARWTEKQKEGIRKTLKEVQSWTQLAEVWMEKYLKVEMELYNGRPEDTSGRKEKEIKVYDILDSLHIPYIRADHEAVMTMEACEEIDKALGMEICKNLFLCNRKKTSYYLLLMPGNKALKTKELSQQIPTTRLSFASGEDMETYLNVTPGSATVMGLIFDPENKVQLLVDEELLEQEEFGCHPCVNTSSIKMKTADVFDKFLKEIHHDYITVKLSDGNEQEMDKQELALVVIDRLKKEYPDAGCTLDYDDAWKLLVSVRLAAQCTDARVNVVVEGLYAKYPDVNALAEATPEEIEEIVRPCGLGKSKARDISACMRMLRDEYDGKVPDDFNKLLKLPGVGRKSANLIMGDVFGKPAIVTDTHCIRLCNRIGLVDGIKEPKKVEMELWKIIPPEEGSDFCHRLVYHGRDVCTARTKPHCEKCCLADICCKQIMSDVVSILDELQNKALKDEKLKQQLLATRTEADPLSAFCRTCRELGYELYEMELIAAGEEFHAAMKRSTNGGGENSPMIEAEDDFYELFFANLEDHMEEMFCFQCQQTAHNSGCEGRAGVCGKKSDTANYQDELTSALIGLSRAVRKKLALNPDASFEHADELILKGLFTTITNVNFFNDTIIELIREVNVEKDRIYPDIMNYDVHHIWEDQEDIRSLKSLILFGLRGMAAYAYHAYALDYVDRNVLDFFYEGLEAIASEKSSDELLALVLKTGEINFRCMELLDHANSGTYGNPVPTEVPLTIEKGPFIVVSGHDLHDMELLLKQTEGKGINIYTHSEMLPAHGYPELKKYSHLKGNFGTAWQSQQSEFHNIPAPILFTTNCLMPVRQSYCDRVFTTSIVSYPDLVHIGEDKDFTPVIEKALECKGYPEDHPMTGINGGSTVTTGFAHNAVLSNAGHIVELIKAGKIRHIFLVGGCDGAAPGRSYYTDFAKAAPMDTLILTLACGKYRLNDLDLGSIDGIPRILDMGQCNDAYSAIKVALALAEVFDCTVNDLPLTLVLSWYEQKAVCILLTLLSLGVKNILLGPTLPAFVSENVWKILVENYNIQKISTVEEDMKKILGMDFRQITMMQKIKSGMDRFRANHPKFPLFLRAVSQDALVEGSIIEINVTTPEGKNYCTNVKLKADDMELFDSFKNMQGMSEAIKEAEKILKQYYGYDHFREGQIPVIKAVLGGRDVLGIMPTGAGKSVCYQVPALMMEGITIVISPLISLMKDQVGTLNQMGVHAAFLNSSLTAGQYYKALQLAKQGRYKIIYVAPERLETESFLDFALSEHVKISFVAVDEAHCVSQWGQDFRPGYLKILDFLDRLPYRPVVGAYTATATAEVREDILDILKLQNPYVETTGFDRGNLFFAVKKPVDKYKELVSYLKEKGCDTSGDSGIIYCLTRKSVEQVCYALRNEGFSVTRYHAGLSDEERKENQENFIYGKRQIMVATNAFGMGIDKPDVRFVIHYNMPKNMESYYQEAGRAGRDGEPSECILYYEPRDVRTNRLFIENGEENSELDEETRKIVKERDLDRLKQMTFYCFTSECLRQYILNYFGEKSSSYCGNCLNCQTQFEKVDITPEAKSILRCLAALDWNYGASTVIDIVHGGKSQKILGKNLDKNPEYAVLSDRTVPRLRQILRELQFREYVEEKGEQYPVICLTPEGKAFMETEELLVMKLPKEETEKKSESKEKKNRRKKGAVAAELSEKDAELFESLRELRREIAAEEKVPPYMVFADKTLAGMCVMRPATLDEMLEVSGVGEHKLEKYGDRFLEIIRKGMAKKKIYAVRKGHKTGLFETWAECQKATSGYSGAEFRGFTDREEAMAFLQMSTTANVSKDEEKEAAGIVEVPENMVIAYVDGSFEKSIGRYAFGCVILTPAGEEFRKSGSGCDPEGVKIRNVAGEMLGAMNAVQWAKEHEYPAVEIRYDYEGVEKWVTGVWRAKTPLTSKYAAHMQKAAEQIKISFCKVAAHTGNHYNEEADQLAKSALLRTDENVSIMKKNDRRKRKLQEEACDYEIERTPTTRYEPDYEEGLTSAQAEEHRRDGWGNISVDPPAQTTEEIIKENVFTYFNLIFLVLAILLIIVGSFRNLTFLPVIIFNTLIGIIQEIRSKKTLEKLNMLNAPHATVIRDGKTSRVNSESLVLDDIVIFKAGNQVCADAEVVHGSVQVNESLLTGESDEITKNPGDHLMSGSFIVAGECHARLDAVGVDSYISKLTLEAKAMQKGEQSEMIRSLDKLVKFVGIALIPIGIILFVQSFFFNGDPFRSSITSMVAAVIGMIPEGLYLLASVAMAVSAMRLAKQKVLLHDMKSIETLARVNVLCVDKTGTITETNMSVKDVVPTSNYKKDEMPELPKMLGDFAKAMSSDNITMEALKEYFKEGTGKKAGSVTPFTSATKYSGVTYEEEVHVLGAPEFVLRDDFDEYKEEIEGYAGKGNRVLVFGTYDGELDGKALTGKVTPLGYVLLANPIRKEAPETFAYFAEQGVEVKVISGDNPLTVSEVAKEAGIANADRYVDAATLHSDAEIADAVANYTVFGRVTPDQKRKFVHALKDQGKTVAMTGDGVNDVLALKDADCSVAMASGSDAAVQASQVVLLESNFACMPSVVMEGRRVVNNIQRSASLFLVKNIFSFLLSLFSVVLMITYPMEPSQISLISMFTIGVPGFFLAFQPNKERIQGHFLTNVFLKALPAGLTDVLMVGALVVFGKTFGVNTTDISTAATMLLLIVGFIILFNICKPVNIFRGVVWGGCLTGCILCIIFLPKLFAITGMSTKCIMLFVVFSIATEAVLRYLTLLVKGLQKGYRKIRHREEGIMSKREMYEQKTEEILLPIVEEYGFELVDVEYVKEGSNWYLRAYIDKPGGIGVNXXXXPPTEPEQERLPTFYAGPGNHAFLNMIQNIEPHVYRNEYVPEPPKEDSVILYYEGRKILVKIEDQEISFLTFKEAAVYNPDVYEEYTYLFSIDGQGYYLAEGIDPENFPGFELKDNQYFREARPKYRQFAAVTGWQLYRWYQSRKFCGHCGQPMVHDDKERMMRCPDCGMMEFPKICPAVIIAVTHGDKILMSKYAGREYKKYALLAGFNETGESIEETVRREVMEEVGLKVKNLRYYKSQPWSFTDTLLMGFFCELDGEDGITLDTDELAMAEWFERDKMPVEAEDLSLTNEMMMAFKHGKVMQDSQIIRTEYSDVMKKSYIDYAMSVIIARALPDVRDGLKPVQRRTLYDMHELGIRYDKPYRKCARIVGDTMGKYHPHGDSSIYDALVVMAQEFKKGMILVDGHGNFGSIEGDGAAAMRYTEARLAKITQEAYLADLDKDIVDFMPNFDETEKEPVVLPVRIPNLLVNGAEGIAVGMATSIPTHNLGEVVDGVKAYMKNEEITTRQLMKYIKGPDFPTGGIVVNKDDLPEIYETGTGKIKIRGKVEVEDMKGGKKRLVITEIPYTMIGAGIGKFLNDVCNLVETKKTTDIVDISNQSSKEGIRIVIDLKKGADVENLTNMLYKKTRLEDTFGVNMLAVADGRPETMGLKRIIEAHVDFQFDMATRKYKTLLKKEQDKKEIQEGLIKACDVIDLIIEILRGSQNVKDAKACLMNGETENIKFKSSISKKMAGMLRFTERQATAILEMRLYKLIGLEIEALQKEHEETLAKIEKYEDILNNYDSMAAVIMEDLDRIKKEFARKRRTVVENAEEAVFEEKKVEEQEVVFLMDRFGYAKTVDVSTYERNKEAADNENKYILHCMNTGKICIFTKDGKMHQVKVMDIPYGKFRDKGQPIDNISNYDSTQEEIVYICDSEQMRYAKLLFATKQGMIKKVEGTEFQVTKRTITATKLQPEDEVVKIQVVTENQHIVLQTTDGFFLRFPAAEVTEKKKGAIGVRGIRLKKDDALTDVYLFEEGTECKISYHEKEVTLNRLKLAKRDGTGTKYRGMAKKNTYDAGSIAILEGLEAVRKRPGMYIGSVSTKGLNHLIYEIVDNAVDEHLAGYCSEIHVTLEKDGSATIADNGRGVPVDLHATGVSAARVVYTTLHAGGKFDDSAYKTSGGLHGVGSSVVNALSTYMDVQISRDGYIHHDRYERGKPVIELEDGLLPTIGKTRKTGTKVNFLPDDTIFEKTKFKAEEVKSRLHETAYLNPDLKIVFEDKRGAEPEQIIYHEPDGILGFIRELNHKKEVVHDPVYFKGEAEGIEVEVAFQYVNEFHENVLGFCNNIYNAEGGTHLTGFKTTFTTAINQYARELGILKEKDANFTGADIRNGMTAIVSIKHPDPRFEGQTKTKLDNPDAAKACSKVTNDEIIRFFDRNLETLKKVIGCAEKAAKIRKTEERAKTNLLTKQKYSFDSNGKLANCESRDASKCEIFIVEGDSAGGSAKTARDRMFQAILPIRGKILNVEKASIDKVLANAEIKTMINAFGCGFSEGYGNDFDISKLRYDKIIIMADADVDGAHISTLLLTLFYRFMPELIFEGHVYIAMPPLYKAMPKKGEEEYLYDDKALEKYRRTHDGPFTLQRYKGLGEMDAEQLWETTLNPETRLLKLVEIEDARMASSVTEMLMGSEVPPRRSFIYENATEAELDIMKKKDRQRMLEKYMKCAAWGSAGILLTCFIRGHVIKENGTVRELKISFLEKGKEVIADCAVGNIMTTLAYTSEKDHVGGPAEDVTQTVMKLFPIGTYLSAEKEDTIAEDSQTYAMILEKQANDENAVDENGKLITQEQSVTQQEMVKIPEAKVDISMDKLRDYEYLMSHFYTVDSSTMADANLINADRLLGKNMKLNSNSNEEAAGPKVLIYHTHSQEQFKDSVPGDANTSIVGMGTYLTDLLNQKYGIETYHHTGVYDLVNGKLDRSKAYQLAEPDVQKILKDNPSIEVVIDLHRDGVAEGTHLVTEVDGRQTAQIMFFNGLSRTRANGNISYLPNPYLEDNLAFSLQMEIAAAKYYPGFARHIFLRAYRYNMHFKPKTLLVEAGAQTNTVEEMRNAMELLAELLHQVLSMMVEKYKIRTDLAMEQKERFESDHVEVSGVVLEEEYDEEKEIKITTVRIETENGAKSMGKPVGTYLTLEAPNMAAADEGYHREISETLADFLEKYMKDTEENQEKGYSVLVVGLGNREVTPDALGPYVVDQLNVTRHIVQEYGRYAVGKGGSRIVSAIVPGVMAQTGMESAEIIRGIVNETTPDLIMVIDALAARSTKRLNRTIQISDAGIYPGAGVGNHRSEITKDTMGIPVIAIGVPTVVDAATIVNDTMENFIMALETSETLKGVGVVLQGYNSAEKYELVKELIAPHLNGMFVTPKDIDDTVRRISYTISEAMNMLFAGKEKIMQSMANIKSAKKRILVNETKAARNKAIKSKVKTCVKKVETAVANKDAAAAADALKVAIVEINKAGSKGVYHKNTCSRKISRLTKAVNGIAMAARIFYQEDCNLSVLEGQKIAIIGYGSQGHAHALNLKESGCDVIVGLYEGSKSWAKAEAQGFKVFTAAEAAKQADIIMILINDELQADMYKKDIEPNLEEGNMLMFAHGFNIHFGCINPPKNVDVTMIAPKAPGHTVRSEYQAGKGTPCLIAVEQDATGKAWDRALAYGLAIGGARAGLLETTFRTETETDLFGEQAVLCGGVCALMQAGFETLCEAGYDPRNAYFECIHEMKLIVDLIYQSGFAGMRYSISNTAEYGDYVTGPKIVTAETKKAMKQILTDIQDGTFAKDFLLDMSPAGRQVHFKAMRKLASEHPSEKVGAEIRKLYSWNGEDKLINNMQRVFSLLVDNNPGVLSRVSGLFSRRGYSIDSITAGVTADPRFTRITIVASGDELILSQIEKQVRKLEDVIEIKVLQPEDSVYRELIMVKVRANKTERTEIISVADIFRAKIVDVEKDSLMVELTGNGSKVDAFLELLEGYEILELARTGITGLQRGIKDVTVIDQEGNINTLMEKEKLDKMYDICFFDLDGTIIDSSPGITNSVMYALEKFGIEETEREKLYKFIGPPLTDSFARFYGFDDEKSWKAVEYYREYYQDTGIFECSVYPGFEKSLKALKTAGKRLFVATSKPEVYARRIIEHFDLDQYFEYVAGMELDGGRGSKAEVIGYLIDTCRMQDKKRILMIGDREHDVLGAKQEGLDCMGVLYGFGNREELEKAGAVYVAGTPEDIAGIILKMSRNAIKYLAMAAMFCNHFAYIFLKEGSTGQEVMVDIGYFTAITMCYFLVEGYHYTRSVKNYALRLLVFGILSQIPFMLALKQTNLNMMFSLLLCLGVVWVADHVKHKGEKMLWLCVLVICSLWTDWALLAPVFTMLFANAYGDRKKVSLAYGKAVGLFFLLNVLSYRADCGLESALIHSTCACIGPAASGVVIQCMYNKADKTAHGWGKWFFYGFYPVHLLLLWMIQFAKVMFGKLALRNVRRSARDYLVYVLTMTFVVSLMFAFNSIIFSKDLQKMYEMAAIMAAMIGIATFFIVLIVAWLINYMVRFMLEKRSREFGIYLLIGMNKKEVSGLYMKENLLLGVCSFVIGLGLGMLLQQVLLVVLYSVIQVELRPHLEFNGYCFLMTVCCFAGCYLLALFRCSRKFRKMNIHDLMRENQKNEELKEKNEKIKRLLLPFSILFIFAFGVWILSGNIQSPGGAVVFLTGLFITMYVFYTGLSAWIICYVKKKGNAVYRGQNLFLLRQFASKLKTMRFTMGTLTVLFMVAFLGCSVALMFTDWQNQVLEMKFPFDVQVNSQNPEYDFAKELDIVGEEAGVKDSCVYRIYENHTNTMNTWLYTHLRYFGDEYRREDGTPDEKKIRKGSDDDAYCRYDTYMGLSDYNHLRKMLGYSTETLGKNEYILQMKQRVYKETGDFTDDVKLQDRGETLTCRKICTESFSQDGHNGGDYIIVVPDERIQQMTPYYSELAVSVKKKVPDNLQNKLDDLSDKHDYAGHTYMEEDDDNVCYGTDTIVTYAAVNLVRENASAEVRYMMSCITFPCMYIGLVFLCIALTVLSVQQLSDSAKYRFRYQVLSKIGLGRREIQQTVFRQLSGYYLCPAILSAVISGIIAVYMGAGFTFYTGVSTPVLQYFAISFALFFGVYVVYFGATYVGFIRNIEEMRRIRKHGKTTEKKTDRILAGGRIPDGEIRVCDVEKYYGSDTNITKAVDRVSFCVQKGEFVGIMGASGSGKTTLLNMLSTIDRVTAGHIYYGETDITELSDEALAEFRKDNLGFIFQDYNLLDTLTIEENIVLAMTLHSKSKREIQEKCDHILKLLDIEEIRDKFPYQVSGGQKQRCACARAMIHRPKLILADEPTGALDSRAAQMLLETFRKMNRDMHSTILMVTHDAFSASYCSRILFLKDGKIFHELVRGVEERREFLNKILDVLSLTGGELSDVRMKFSEYIKDKILICLLHLLCMILLMGFFYITGYNRNAAALILIFWWIILGIWIVTGYYRRKKYFDRAEHILENVDQRYLLGELLPASPYLEDRIYRELIRRSNKSVIERIRMLEDEQNDYRDYIESWVHEIKAPITSIQLVCENHKDEVTRQIGLENQRIENDVDMVLYYARMEKVYKDYMIEETDLGKAASEILMKNKYYLISNGVRGEVECPDLAYTDKKWILFILNQLMLNSVKYKSENPKVHPYIHIYTERYGHGVRLIVEDNGTGIREEEMSRIFEKGFTGSNGRNGKKSTGMGLYLCRRLCEKLGIAIEAESVRGEGTKMILTFPVSSYLSKMMKIVIVEDDPGIRKELKQLLENAFYEAEIIEEFKDTAEQICSMIPAPDLVLLDWNLPGESGFDICTKLKEHSDIPIIFLTSRTDSMDELTGILKGADDYITKPFNPPILLARIGVVLKRTTGKNAEKSRGNALNMEYKGVILNVVGGCIEHEGKKTDLTKNELKILHLLYQKKGEIVPRLDMIEYLWDNEVFIDDNTLSVNVTRLRGKLADIGVTDFIETKRGMGYRIMSKKPTVLMILDGYGLNEKTEGNAIAMAKTPVMDKLMSEYPCVKGNASGLAVGLPDGQMGNSEVGHMNMGAGRIIYQELTKITKAIEDGVFFENKALLAACENAKKNDSALHLMGLVSDGGVHSHIGHIFGLLELAKRQGLEKVYVHCFLDGRDTPPASGKEYVEQLEAKMKEIGVGEVASVSGRYYAMDRDNRWDRVEKAYKALSAGEGETAASATEGIQASYDADVTDEFVVPFVVTKDGAPVATIKENDSVVFFNFRPDRARELTRTFCDDSFDGFDRGDRIKTTFVCFTEYDATIENKQVAFVKEEITNTFGEFLAKNGKKQARIAETEKYAHVTFFFNGGVEEPNEGEDRILVKSPKVATYDLKPEMSAYEVCDKLVAAIKSDKYDVIVINFANPDMVGHTGVIEAAVKAIEAVDECVGKAYEALKEADGQMFICADHGNAEYMIDEETKEPFTAHTTNPVPFILVNADPAYKLKEDGCLADIAPTLIELMGMEQPAEMTGTSLLVKMARKKIVAGNWKMNKTPSEAVALVEELKPLVANEDVDVVFCVPAIDIIPVAEAVKGTNIQVGAENMYFEESGAYTGEISPAMLTDAGVKYVVLGHSERREYFAETNETVNKKMLKAFEHGITPIMCCGETLEQREQGVTMDFIRQQVKVGFQNVTADQAKTAVIAYEPIWAIGTGKTATTEQAEEVCAGIRACIAEVYDEATAEAIRIQYGGSVNAGNAAELFAQADIDGGLVGGASLKADFGKIVNYKMLNKKSVDDINVKGKKVLVRCDFNVPLIDGKITDENRLVAALPTIKKLIADGGKVILCSHLGKPKGQPVPELSLAPVAVRLSELLGQEVKFAADPEVVGPNAKAAVAEMKDGDVILLENTRYRAEETKNEDAFSKDLASLCDVFVNDAFGTAHRAHCSNVGVTKYVDTAVVGYLMQKEIDFLGNAVNNPERPFVAILGGAKVSSKISVIENLLDKVDTLIIGGGMAYTFAKAQGGTVGKSLLEEDYCQYALDMIEKAKAKGVKLLLPVDNVVGDDFSNDANTQVVKAGEIPEGWEGLDIGPETAKIFSDAVKDAKTVVWNGPMGCFEMPKFAKGTETVAKALADTDAVTIIGGGDSAAAVNQLGYGDKMTHISTGGGASLEFLEGKELPGVAAANDKMAVKVAINGFGRIGRLAFRQMFGAEGYEVVAINDLTSPKMLAHLLKYDSSQGKYALADTVKATDDSIIVDGKEIKIYAKANAEELPWGEIGVDVVLECTGFYTSKEKASAHIKAGARKVVISAPAGNDLPTIVYNVNHETLKPEDTVISAASCTTNCLAPMAKALNDLAPIESGIMCTIHAYTGDQMTLDGPQRKGDLRRSRAAAVNIVPNSTGAAKAIGLVIPELNGKLIGSAQRVPTPTGSTTILTAVVKGHVTVDEINAAMKAASTESFGYNTDEIVSSDIVGMRYGSLFDATQTMVLPLENGTTEVQVVSWYDNENSYTSQMVRTIKYFSELAMIQADMHMHTWFSTDSEACPRDMADEAVRKGLKTICFTDHFDKDDLEWGEEGIFDVDAYFVEMQKLQEEYAGKLNIRIGIELGLRTYLKDYYEELTKKYPFDFVIGSVHNVPYKKDAEGNILYTDPAAEKLFTDRTDKEAYRLMMETTLENVRTSDCFQALGHLDYVVRYGKSREKEYSYTDYADIIDEILKLLIEKEKGLEVNSAGLKYGLPFAHPHPDVLKRYRELGGEIITIGADAHKPEHIAYDFAKAEEILKSCGFKYYTEFFEQKPVFKQLIMKKKKVVVGMSGGVDSSVAAWLLKNQGYDVIGVTMQIWQDEEEAAMEEHGGCCGLSAVDDARRVAAALDIPYYVMNFKKEFKENVIDYFIDDYLHGRTPNPCIACNRYVKWESLLKRSLDIGAEYIATGHYARVEKLSNGRYAIRNSATAAKDQTYALYNLTQDQLSKTLMPVGEYTKDQIRAMADEIGLLVAHKPDSQDICFVPDGDYASYIEENSDAKITPGNFVLSDGTVVGKHKGIIHYTVGQRKGLGLSLGHPVFVLEIRPETNEVVVGSNEESMSRYVRADQVNFMTVEDLTEPKRVWAKIRYNHRGAWCTVEKTGEDEILCTFEEPQRAITPGQAVVLYDGEYVLGGGTIIADKMYSEKVMDHFEHPRNVGEIENASGVGTVGNAKCGDIMRIYLDIDDNQIIRDVKFKTFGCGAAVATSSMATEMVKGKTIQEAMEVTNKAVMEALDGLPPVKVHCSLLAEEAIHAALWDYAEKHDIKIEGLKKPKSDIHEGEEAEEEEYMSKLLYLDNAATTKTAPEVVEAMLPYFTEKFGNPSSVYSFAAANKEVINQQRDAIAEMIGAKSNEIYFTGGGSESDNWALKCTAEAYANKGNHIITTKIEHHAILHTAEYLEKRGFEVTYLDVDEDGKVKLDDLKAAIRPTTILISVMFANNEIGTIQPIKEIGEIAHEHGILFHTDAVQAFGQLPINVDECHIDMLSASGHKFNGPKGIGIMYIRTGVKIRSFIHGGAQERKRRAGTENVPGIVGIGTAAKRAAASMEERTAKEREVRDYLIDRVLNEIPYCRLNGHRTDRLPNNANFSFQFVEGESLLIKLDMKGICGSSGSACTSGSLDPSHVLLAIGLPHEIAHGSLRLTLNEEIEKEDIDYVVDNLKEIVAHLREMSPLYEDFIKKQKKQGEKMKLSTKGRYGLRAMIDLARYSEKEPVSIGSVAARQEISERYLEQLVALLKKAGLVKSIRGASGGYVLAKKPSEISVGDILRALEGSLEPVKCAAFDTTTGEGCMASDGCVTKYVWQKINDSINDTVNQIMLDELIQESKSINPDGECENPKCSQMSGKRALIRGTAILTITSFVTRFMGFFYRIFLGHTFGEENVGLYQLVFPVYALGISFSCAGTELALSRCVAQENAAGHPEKAKELLKTGLIFTFVLSCILTIFLQHNAHMTAISFLHDSRCEELLILLSYTFPFASIHSCICGYSLGLKQTKIPAVSQLFEQTFRILFVFLFCYYRTSHQLDLSISFAVVGLAMGEIFASCYCLYSIHHTASKQVQNLLSASTFCIHLSRLFRHAFPLTASRVLLNILQSIEAVSIPVFLQYSGMSSSLSLQVYGVLTGMALPCILFPSAITNAVSSMLLPTVAEIQEMKEKRRLQAIISKIACSCIFLGCFCCIFLLISGKWIGIFLFKSPLAGSFILTLSWICPFLYTNTVLLGMINGLGKTTFSFIINFLSLCIRIAGVCLFIPIWGINGYLTGLLISQIFLFLCCILRLVIYIKNFSMKIQTKQKYVLLAGMTGFVLGICSANLWMKEYILDIGIFNQFFLEQYNRLEIVYEEYFWYLIKNRGVFLLILTAAAGTRYRKSAVILTVIWLGFCVGMVICAAIARLGIKGIVLCVIAVMPQGVFYILSGILLFEYMLEYPVVRWNSGKTIKLIMLVLLGMITECYVNPVIIRMFLKTLMSEDVIRTGRDLAYQGTVLKVYKDHMKFSNGNTEEWDFIHHDGAAAVIPVMEDGKILMVKQYRNALERDTLEIPAGKLDDPNEEGIVCAARELKEETGYSSENLEWILTIRTTVAFCDERIEVFVARNLIPGEQSLDEDEFVDVKAYELDELKQMIFEGKIQDSKTMAAILAYESKYLHGMYEKQPVTKTSERCCHGQVLQVADPVEWLELKKILLKEMPIGIVIAVAVVLIVVAAVISHFLTVSNLKNNAESKIGNAEARAREIIDDAVKTAEAKKKESLLEIKEESIKNKNELEKETKERRSELQRYEKRVLSKEETLDKKSEAIERREAGFTAKEEELRQREAKVEELSQQRVQELERISGLTSEQAKEYLLKTVEEDVKHDTAKMIKELEAQAKEEADKKAKEYVVTAIQRCAADHVAETTISVVQLPSDEMKGRIIGREGRNIRTLETLTGVELIIDDTPEAVVLSGFDPIRREVARIALEKLIVDGRIHPARIEEMVEKAQKEVDTMIREEGEAAALEVGVHGIHPELIKLLGRMKFRTSYGQNALKHSIEVAQLSGLLAGEIGLDVRLAKRAGLLHDIGKSIDHDVEGSHIQIGVDLCRKYKESPTVINAVEAHHGDVEPETLIACVVQAADTISAARPGARRETLETYTNRLKQLEDITNQFKGVDKSFAIQAGREIRVMVVPEQVSDADMVLLARDIAKQIEFELEYPGQIKVNVIRESRVTDYAKMMTVTKIEPLSKTRYKVYLDGQFAFTLYKGELSRYHIAEESVIEDDIYDSLQQIITKRAKLRAMHLLSDMGRTESQLRTKLKQGGYTEDAVEAAIRYVKSFGYINDVEYARSFIDSRKERKSKKELYAALVQKGVSSEIVEQVFEEADYGEEDSRQAIEALMRKRNYNPETADAKEKQKMMGYLMRKGFSYQDVRNVLQVCEMANEDKKRALDAAIAKLEKDFGKGTVMRLGDPAAQVAVETIPTGSLSLDLALGLGGVPKGRIVEIYGPESSGKTTVALHMIAEVQKRGGIAGFIDAEHALDPVYAKNIGVDIDELYISQPDSGDQALEITETMVRSGAMDIIVVDSVAALVPKQEIEGDMGDSHVGLQARLMSQALRKLTPVISKSNCVVIFINQLREKVGVMFGNPETTTGGRALKFYSSVRMDVRRIETLKQSGEMVGNRTRVKIVKNKIAPPFKEAEFDIMFGKGISKEGDILDLAVKCDLVSKSGAWFAYNGDKIGQGRENAKTYLSEHPEIMEELEQKIRAHYHIGAEGDVEENEEAAEGITKEGEMFDNRCMYYLTIVVVMLFSVSFIKLNKFWELDVRYGEVESDESMGTTIFKGVRFLIGIVLILMPGIMNPVYQSTEGMIVECVKADPVWRVDADDGVWHVTVEDTETGTKKIFYRVKGLKNVREGMKVEIHSFDADMFLGEVFAKVDGRTTQWYKNGIKERPGERVILLSLFLAYALELCWIIMKGKQKLEERKIVTYYYYLAILGLGLYASMVIFVWRQHVSGRPWSDMLCIGFYLYMFGEMVISLSGVPVEKIKQEERLKKERKSLRAEQENRDEKERFETEWREREEGKTVNKENVLKLTKMGYIASKKYCRKKYRKEVRKHMKGIGPVFFANTGVLVIICLILEGETALLTVGADILLFILIYVISRWNAGRKCREWKKSVVPGKMCEYGMFRIRYLDQIEFECAEGKKIIYRMDREKEDIGWDGNLAVAVYVEAQDRLCMESPRMLSQFIERDWGDADQGMGRGSITLYIMIIAGMGIVLSGWWYRNIWFKVEETIEIYVNVFWICACLLAALSIYGWRMHELLDTCNRTMEIQEGVIKDVVLIDTVTQYDDFDIYEVTLYGRERPIEKVVSGIGLKKGMHVRIDAYRSSFYGTLVSRIDGKTPEYYKKIMEHKNVKTQTVLLLLMLQSIEMLIISGREYVKHGKRKQGRRWFWFAAVLAELTILVPLAAIKYPQYGRVLSWSEVIMLILYVIAEMRLAWQANVGSNWKLWEEVRYIWHIEGEDSDTEEESPKYKEISYQVHQMQQMSISSSERYCRYRYKNGMKEVRFDKWACVVVGLDSAFLAWLVTLGSGSDASIWGIVVAGIIFALVMIIWGTKIFGKKWESYKMEMESRVPCEYCCIKEDVFENMKFRCSDGHDEIWRMNLDEEAKVKDGETVMVIFMPTAMEMRLERLPYMDKIWEGMKRRPHKIVSVVLLVVLIAGMGMACRIQSLESRNKRWTENTETAGKILTESGKKEAQKQTNGTENDDAAQNAKRVFGDEPAELYARSAVLMDADSGRVLFGKDTDVVRPMASTTKIMTCILALEYLREHPDQTIEVSDQAASQPKVHLGMQKGEVFYIKDLLYSLMLESHNDSAVAVAEGIAGSVEEFAKEMNAKAAEIGCKNTHFITPNGLDAEDEGGVHSTTAEDLAKIMRYCIMTSGEKETFLEVTRTKEYQFQDADRKRTFSCHNHNAFLDMMDGALSGKTGFTAEAGYCYVGSLRRDERTFIVALLACGWPDNKGYKWKDTRRLMEYGLEHYQYRDIDKKMQIPEIKVAGGVDDKKPYQYCLNVPVKIERPAEENSKILMRDGEELRAKLELAKYWNAPLKKGEKIGMLTYYLDGYKVAEYELKNEKAVAKRDFSWCIFWIIKSVMLMAGNNMENHFTRQTAGGVIFLFFRAYIFLTEYTRSGEIMAKLKIKQMEGIIEAILFTMGDSVEIGKIARALEQDEETTRKVIHKMMDKYVAEDRGVRIIELDGAYQMCTKTEMYEYLIRVASQPKKHVLTDVLLETLSIIAYKQPVTKLEIEKIRGVKSDHAVNKLVEYNLVSERGRMDAPGKPILFGTTEEFLRRFSIHSLDDLPSPNPEQVESFKEEAEEEVQLKLDIMGIPVKLQVFEGPLDLLLHLIEKNKIDIYDIPIVEITNQYMEYIKAMQKEDLNIMSEFLVMAATLLDIKCRMLLPKEVNEEGEEEDPRQELVEQLLEYKMYKFMSYELKDRELDGDRVMYKSATIPDEVKGYVPPVNLDELLGDLTLVQLNRIFKEVMKRQESKVDPVRSKFGKIEKEEVTLPDKLDYVTEYARSHRKFGFRALLKKQSSKVQVVVTFLAILQLMKEGVIFIEQDQPFDEIMITSKVEEIMIKIILIIVAVFIVYCLIEMIRELRDFRVTKYRICSQKLNGIKREKKIIFLSDLHNRMYGEENERLLESIRNQHPDLILIGGDMLVRKDGNSYDKTVHFLAKLPGICPVYCANGNHEQKLKELPDKYEQSYEEYKKALTASGIHMLENASETVKLEEVPVKLSGLEIPLGAYARFGRKELSLKEITDRIGEHGDDYQILLAHHPGYMKEYLAYGADLILGGHYHGCVVQLPGIGGVISTNFTLFPKYSGGIYPEGEQTAVVSRGLGTHSVPLRLWNWPELIVLELSGNERMNIPERISALRALMEERGYDVYMVPTDDFHQSEYVGDHFKVREYITGFTGSAGTAVFTKDEAGLWTDGRYFLQADQQLAGTGVKLYKMGEPGVPTVEEFIASALPEGGTLGFDGRVVAIEEGAALEEAVASKDAKINYSEDLVGEVWADRPALSEKPAFALGEEYTGESTESKLARVREAMKKAGADVHVIAALDDVCWITNLRGDDVDFFPLLLSYAVITMDEMKLYIDERKLNDDMKADLAKNNITIHPYNAIYEDIKNLDTASTVLVDPNRLNYALFNNIPGGTKVVQQVNPTIAMKAKKNDVEIRNIINAHKKDAVAMTKWMYWLKTNIGKIEITELSAAAKLETLRKEQEGYLWQSFEPICASAEHAAIVHYEPTPETDVPLTQNGLFLTDTGGGYLEGSTDISRTFAFGELTQQMKEDFTTVLQCNFNLAHAVFLEGTTGYNLDVLARMPAWRRGINFNHGTGHDVGYLMNIHEASCGFRCAIREKEQAPLMAGLVITDEPGIYIEGSHGVRTENELLVRKGPKNEYGQFLYFEPITYVPIDLDAIIPEMLTDQEREQLNEYHKKVYEIVAPHLNDEEREWLKEYTRAIMRHRRCISAILMSFVLFLQPAYAVPSEENQPENSQENNTENEKRQQEQISAPSAILMEASTGQIIYEKNPDEKLPPASVTKVMTLLLIFDALDSGQIKLGDEVTTSEYAASMGGSQVFLEPGETQTVDTLIKCISVASANDACVTMAEYICGNEEEFVTKMNKRAKDLGMKNTHFVNCNGLDADGHLTTARDIALMSKELITTYPQIFDYCNIWMENIIHKTQKGESEFGLTNTNKLIRQYEYATGLKTGSTSKAKFCVSATGRKDDIDLIAVIMAADDSKVRVRDAITLLNYGFGKCQKYTEKKQKKISPVEVRGGREKQVKVRQQGAFTYVDTTGADLTKIENKTRKDKNVKAPLKKGEKVGETMYYLNGKRIGSIDIITTEEIEKQNYRSALENVLEEYVLMKFIYPAVFHKTEEGHYKGYFPDLECCYGEGETLDEAIESANEAARDWITLELSEDEPMIPYVSDIEDIEVKDGEIVRNISMNIRFYEGWDEMANRSSNKAAVPEAKGALDKFKYEVASELGVPLSDGYNGDLTSRQNGSVGGYMVKKMIEQQEKQMAGKMIEKTDIGDLKGIGEKTKKLFEKINVYTVGDLIRYYPHGYDVYEEAVPISELEEDKIQTVTGAIYGRVQVSGSSRMQVTTLHVKDLTGTLKVIWFRMPFLRNTLSGGGVITLRGRVVRKKTGDLVMEHPEIFYPSAKYEEKLHTLQPVYGLTAGLSNNMVMKAMKQALDGLDLTREILPDSLRLKYGLAEYNYAVRGIHFPEDKEVFYHARERLVFEEFLEFILSIRRLKEKNERLDNNYPMQSRPEVQKFLENLPFELTGAQQKVWKEIEKDLGSDKTMSRLVQGDVGSGKTIVAVLALMNAAFNGYQGAMMAPTEVLARQHYENITKMFEDYDIPIKVELLTGSMTAKEKRRAYDRIECGLAKIIIGTHALIQGAVSYDNLGLVITDEQHRFGVKQRETFALKGGEPHVLVMSATPIPRTLAIILYGDLDISVIDELPANRLPIKNCVVDTGYRNKAYNFMKKQIAEGHQCYVICPMVEESETMEAENVTDYTVTLQEEMGDQIQVACLHGKMKQAQKDDIMDQFGRNEIQILVSTTVIEVGIDVPNATVMMIENAERFGLAQLHQLRGRVGRGKYQSYCIFMSASKSKETKERLDILNHSNDGFKIASEDLRLRGPGDLFGIRQSGLMNFKLGDIYQDAKILQMANESADQLTEEDEEWIRKLPNYENAAGVVIMATKTINVDILAKMFLAGAQNIEAKKDYINELNVFPVPDGDTGTNMSMTIMSAAKEVTALNKPAMKDLAKAISSGSLRGARGNSGVILSQLLRGFTKAIKEEKEIDVLALAAACQRARDTAYKAVMKPKEGTILTVASGIATKAAEMAEETDDLEVFIPAVIEHAQDVLNQTPEMLPVLKEAGVVDSGGQGLLEVIKGAYDAFLGKEIDYSVIEPSTGVTVNKANAEDTADIKFGYCTEFIILTEKEFTEDDEREFKKFLSSIGDSIVCVADDDVVKIHVHTNDPGLAIQKALTYGQLSKMKIDNMREEHQEKLIRDAEKLAEQQANEEAAHEEKKPAEPRKAMGFIAVSIGAGMNEIFKELGADYIIEGGQTMNPSTEDMLNAIDRVNADTVFILPNNKNIVLAANQAKSLVEEKEIIVIPTKTVPQGITAIINFMPDADAKTNEEAMLEEIKNVKTGQVTYAVRDTHIDDKEIHEGDIMGIGDSGILAVGKDLEETTKELIANLVDEDSELISIYYGEEVSEEDAEKFTEEITELYPDVDVDIQFGGQPIYYYVLAVEMKGCMSTDLGIITIDPEVIAKYAGTVAVECFGIVGMAAVNVKDGLVHLLKKESLTRGIHVNISDDNHISIDFHIIVAYGVSISAVTDNLISDVKYRVEEFSGMQVDKINVYIEGVRVIDMAKCAICEKGAHFGNNVSHSHRKSPKMWKSNVKSVRVKTENGATKKMYVCTSCLKSGKVERAMKRIVGFALFWVAAGMVLALVLPGLFCQILCIILCIAVGYCLFCCMAENNFKGTVEALFHGMDAVVSSKTVVGDAIHIGDTIILPLVDVSFAVGAGAFNADKKEKGAGGIGGKMTPSAVLVIQNGHTKLVNIKNQDTITKLLDMVPDVMDRFTSRKEDNVTEDDVNKILDEAEKMVLHILLIILKIIGIIIAVLLGLILLLLVILLCVPVRYRMEASMPGEIKESTVRGRVTWLLRLIRIDVSFEEQELKWRVRIAWKSFGSEPKKEVTHGEENTDREETRKEQRVESSRGLPKVEKESAEEKTIVESGQAASKDMEERSGKKTEKSPESILQKTHERPEKVQPEKNSEKPEKTDKIEKKEEKTGRFEKIKCTIVKFCDKIKHTVGHAEEKLESLSEKKDKIIKELEDPVHQKAFSKAKKETGKLLKRWKPKVIKGTVRFGFEDPCHTGQALAAFSIIYPFIGEFLSIEPNFERRILKGDVKVRGGFRMVPLVCFLWNLVWCREIRKTYHDIREFQLMRYYKHLYLTEGLEKKKEKIIRKLEAGKLQPGVHVITLAVSERNQLEIYPTIQFKQPAFPEQELFVVGITKGYDEAVELVEQIVQEVYDQTGTCDIRSYILEKEQGRMFVGLFLVLLGYIGYFQVKKSQDIIRSPYNARQNSNAKRVTRGTIVDKNGNVLAKTDTAADGSETREYPYGNAFAHVVGYNVQGKSGIESLGNYDLLTSDENFLIKLKNEFQDKKNMGNTVVTTLDADLQEAAYQALGDKKGAVVAMEPKTGKILAMVSKPDFDPNTVEENWNSLSSDTNSVLLNRATQGQYAPGSTFKVVTLLEFMRENPDYSSYSYNCTGSIENSGIKIHCYNGHVHGQVNLQDSLAYSCNTSFSNIGLSLDPSKFKKTAEEVLFDSKLPSDLPYSKSSFTLDGSAGNGTKMMTAMGQGETQVSPYHMALITSAIANGGKLMKPYLVDKVTNASGAVMKETDQEEYKQLMTEEEASQIKEYMKSVVDYGTASVLSGQSYTAAGKTGTAEYSSDKEKDHSWFIGMSNVEDPELVVSVIIESSDGTAKAVNVAKEIFDSYYRMVNIIVQLSKYLMILMITVYTYLCFSIFGYYDPDKKKRCLRKQNVLMFVMHLTAFLVMYLEKKDTKILALYLMQVTLLGGTILLYSFIYPKVSRLVVNNMCMLLSIGFIMITRLNYDKAAKQYLIAAAGIVLCLVIPIIIRKVRFLSEWRILYGIVGIVSLAVVVVVGRVSYGAMLGFTVAGINIQPSELVKIVFVFFVASSFKRSTEFKDLVVTTVVAAFHVLILVVSKDLGAALIIFVVYLVMLYVATHQPLYILAGLGAGSLGAVAAYHLFTHVKTRVNVWRDPFGTYDNGGYQVAQSLFAIGTGGWFGAGLYQGQPDTIPVSAEDFIFSAISEEMGLIYAMCLILICVSCYVMFLNIAMQLHNLFYKMVALGLGTCYIFQVFLTIGGATKFIPSTGVTLPLVSYGGSSLISTLIMFAIIQGLYILREDEEEDIERRKKERLRAKRSRQENAARYRETEYDPQRAKRSQKARKEAAQGKARKKQRIRMNRDVEILAPAGSMECLRAAVAAGADAIYLGGTKFGARAYAQNLSEEDLVQAIEYVHIHGRKIYMTVNTLLKDRELNELYAYLLPYYKAGLDGVIVQDIGAVKFIGEYFPEMPVHASTQMTITNTLGADFLKRYGITRVVPARELSLKEIRDMKKQTGLEMECFVHGALCYCYSGQCLLSSMIGGRSGNRGQCAQPCRLPYQTEGKKPADLMSLKDLCTIDILPELIDAGIDSFKIEGRMKQPEYVYTVVKMYRKYADQYLKLQKEGKGKSSYHVSEADKRELLATYQRRGYCEGYYYQHNGKDMVSLKRPKNGRDGSAEEKPWQDIKVQEKINGILTLSVGNRAKLTVSCGDVTVECIGQEVQAAQKQPLDPARIEKQMRKTGNTEFTFDNLEILVEGNVFLTMQALNELRREGIEELTEQIQMQYRREEAGCGMKTATAGFDSDADGVTETAGKKECCISASVQNKAQLDTVVNSKIRYIYLEEDVEFEREDGVQYFLAMPYIFRENTIKRYEKMYTEIEKKYDGILIRNWESYAWLKRHEYQKEIRSDYNLYIFNRKTKEELRRLGIARGTASVELNDRELARIGIEEQVFIAYGYQPVMISAGCIQKTSASCDGKGGVLSISDRYQKKFAVRRYCRDCYNVMYNSAPLFLADKAEEVHALAPAELRLDFTTESSGQVKEICHAYTLAFEKGCKTEPPMQDYTRGHFKRGVKMASSKNYTEVLIGGKVFTLSGFESEDYLQKVSTYLNHKLDECSNSEGYRKQSAETRSILLALNIADDYFKAKKQGGTLESDIEAKDKEMYDLKHELISVQIKLENAEKAMDKLKEENKELQMKIVQLETEIKNNKMSRRIMTTENLEEDVRIENHLRPQLLEDYIGQTKAKEMLKIYIEAAKARGEALDHLLFYGPPGLGKTTLAGIIANEMNVNMKITSGPAIEKPGEMAAILNNLQEGDVLFVDEIHRLNRQVEEVLYPAMEDYAIDIMIGKGASARSIRLDLPKFTLVGATTRAGMLTAPLRDRFGVVTRMEYYTVEELKMIILRSAKVLEVGIDENGAYAMARRSRGTPRLANRLLKRVRDFAQVKYNGYITEEVADYALDLLDVDKEGLDQTDRGILLAMIGKFGGGPVGLETLAASIGEDPGTIEDVYEPYLLKNGFIQRTPRGRVVTDAAYAHLGICKENEMITYIRGILEGMEEDKVIVDVGGVGYGIYMAGTAMGRLPALGKEVKIHTHLHVKEDLMQLYGFLTRDELRVFRLLIGVSGIGPKGGLGILSALGPDDLRFAVASNDVKAIQAAPGIGKKTAEKLILELKDKLKLEDALENAANAVQNTADTSAGMANEMTGEAVQALVALGYGNTEALKAVRQVEITEEMSVEDVLRQSLKYMLMKNRVAYFGVFTALALIFSYVETLIPINFGIPGVKLGLANLVIVIALYKMKLTEVYLLSVVRVLLSGFIFGNYFSIIYSLAGGLLSLTVMALLKKSKGFSVMGISVAGGVFHNVGQLIVAMLVVETFSVGYYFSVLLVAGLITGLVIGIVSAEMLKRIKNIQFMNWKKKDAVLILTVLLIAGAAFGVHEFAGGDGADTVTVKVDGKVTGTYPLAKDQKIRINGGTNILTIKNGKAKMTDADCPDQLCVHQKAASKNHESIICLPNKVVVEVDGSEESEFDAVANMKCKKNNIIKKLSAVLTASALLLTGCSGAKSSTQTDQDLTYTDMLFDTVIKIQILDPADESILDGLKKLCEKYDTMFSTTNTDSELYKLNHANGQPFTVSSETANLIQEGIHYSELSGGAFDLTIEPVSALWDFKADKPTVPSSDAIAQAVSHVDYTKVDIQDNTVTLEDPEAGIDLGAIAKGYIADQVKTYLKKQGIKHAIINLGGNVDVIGTKPDGSKYNIGIQKPFDESGEAITSVQLKDQTVVTSGIYERYFKKNGKLYHHILDPRTGYPCENNLYSVSIITDSSTKADALSTTCFLLGYEKGMELIQSMDGVEAIFITDDEKVHKIGIMAIYHMQAKVVSRGSGRSAVAASAYMSCSRMYNDYDGIQHDYTRKHGLIYQEVLLPPMASPEWKDREQLWNAVEAAEKTKDSRLAREFVVALPVELDKDSNISLLKDFIQKNFVDMGMCADFAIHDTDGHNPHAHILLTVRPLNENGTWQYKTEKEYLCIKNGEEKGFTATEFKAAQKDGWEKQYRYKVGKKKEYLTSSVAQEKGYEMADKKIMTPEEKALLQARHRQEEAEARNRKKERDARTHRLVQEGAILESIVPHIKEMDLDSLKRELIIRLRGMMTKFTEKATAITPNREIQPDEYFNETDHLIYCSKCNTPRQCRHELQGKVLIPSIRCKCQQEIFEQEEAQRKLHEKQMEIEHLKTSGLQDKALYDYTFARDNGINPEIKLAHNYVSNWEEMKSNASGLLIWGDVGTGKSFFAGCIANALLEKGIPVLMTNFSRILNTLTGMHFEDRNQFINSLNRYSLLPDTDRKLSGNKKEIKKNNLAIRGSKEPLSPYGKFQNVFLSEKELEDIRQTIPDWQDYIERLSGYMASTGKQYQNHAATIISWARQDHPASRQRNYESEEYETLTNEEGYLITPQELKCSTYRIEEVKAPEGFVRQGSEESLYDGTTIISPLEQTTKGTYKENPQSGIVITVSSNTAHQIDPDTGAAIVEVEQKNDEQVGSLLLTKKGEQLTEVTGDSVLAKVKALVSKVRNAVSGKEETGIYKGFKYEETGVEGAEFEVYAKDTIYSPDGMEGKRLYRSRKDRMICGVCGGIAKYFNIDPTLVRLAFVLISMGAGSGVLAYIVAAIIIPDDPEKNNKTSNDNYYLLTLAAIAEEIKHRKAERKTEVILAVGLPLSSFGREKQGFREYLLRKEQPVRFLYESELYEITIQVAVGKLEKLGVFGDDYDTPDGTGVRDYIHVVDLAKGHVKAINYIFSNPGLDVINLGTGVGYSVLDMVKAFGKACGKEIPYEIKPRRAGDIAMCYADPAKAARVLGWKAEKGLDEMCADTWRWQSQNPNGYESSSESSESLSAEVLAYTSVIQQYASQYGIPEYVSAIQAIMMQESGGRGTDPMQCSESPYNTRFSHSPGSITDPNYSIEVGVQTFADCISQAGCSSPQDLDKLKLAWQGYNYGNGYIGWALQRGGYTEANALQFSQEQAASHGWSSYGDPEYVPHVMRYYSGGSLFAGLFGSQQIVSVAMGQLGNSGGQKFWSWYGFDSRVEWCACFVSWCADKSGLIASGNVPKFSLCSDGVSWFQGKNKWQSGGTTPTAGMIIFFDWDHDGNSDHVGIVEKCEGGRVYTVEGNSSDQVRQRNYAVDYASIMGYGVINMSDQNVKAAQKYLNAMFGGHKDWVKLDEDGKTGTAVMQGIIRAFQIQNGISTMLKENLEKVEENIQAACDRAGRKRDEVTLIAVSKTKPVEMLQEAYDLGVRKENAQFQSVDIYYRDTSTGSVYIDPDDFEENTTLRKPDSSDTCQLNKTRKLKGVYNINRGYAVFRQVQILCESDEYYIVQSGDDYGLSNYDHIALTGKDVHEGDVISMTITDSVKQKKPKHKLLEKYTIKERTRKQKADIFMGIVFQIYLCIPWININGKYNTIHMYLIKAFRQNDYVDIYIQTFLKTHTWPQQYSRMAALIFLLAIIAMFLVQCLELFKLYQNIKGINNSNYLLAIGIAWFAVFYIFLAALDAHSEGLIKLYSMPAYFYMITFLALIVVWIFLDMQANIWDDETAKHKAELEECDKKLLQMKINSLEAQYKEMLKSRKVVHDMKNHLLALKKYSQEQDWIGLNDYLNELSEDILDYNYQIWTGNRMLDMILNEKLKEAKDKKIDMQISTEVFTTLPFTDREIISLFGNLLDNAIEACERITDKNTWIHIKMKKMPXXXXXXXXXXXXXXXXXXXXXXXXXXXXXSCVTMTIVFLYSDEILFNASITIFPDFESKFPVGSSASIRSGLLINARHMATLCFSPPDNSMLTKIIYKNFRSNLKNYILFFLSNIVAIIELFVFYGIRSIIKNSITDKVTAEALKTDFQIAVGIIAVITLMLMFYAMKCYIKLRIKDYSMFLILGMKKKAVSLLLLFEYCIGCVISLILGIGTGRILLYIIQRLLVKYYPQYIRMYVLRYQIYKNVCLGSISIMILVFVVLLIWLDGRSLGMLMAEDKKNEKRPISYMWIILAVIGIVLMMAGIILYCGSDTQYLYAHGVLLMGLILAVVFGLALFLNLLKKCKNFYYRYMLDLNQLYSRYLNHMILLILLIVVHFFSLSYLVVQTAELLPLDQYRNQYPYDMIWITEKGNKEYAKKLASTYNGTLTEVPMMRVSTYYGANHIGVSEKTYRKLSKSPALNLKENQIAVRIENSDEKQEDIKDSAYWEGYSTLYAGKYFGKQDSDTLIDVKKNKDIHFNIQSICTQTVLGKYSTDGWHENIIVFSDEYFNKQWNASLKNDNASELELFTFPTTRREQVCQKLKQYNKKSSYHEIGKLQNNLYITDQYLKSQKMRALFSMSSKIFLIIALILSGFFIMSLKTLTEFPALQKRYEFFKCMGMRENQLKWNTFFEIKILGRIAESVSLVTGILYVGAFIHKQKLAGGISNVFFKYWIILVVSYILLNEIIQEVFARYILRKLKENMYDKSQLMRGTLEGCILKILSKNTSYGYEIVTTLLGYGFKDIKEGTIYPLLVRLEKKGIITSEMRPSPLGPSRKYYSITPDGVEYLNEFKTNWKQISQSVNQIFETEVMLNKKDQRIIRQMIRHIRTFPLSDSEIKQLERDLTGMALEAEKRGEDFEDVLDMTPTEFCDELLYSIGGSKAPGGRYLLKGAGIYYQLTGILGTALFSLILLLALFYTIIIPSELAQTGLLVLFVAAIGLTFFLLSLSFGNIAERNCGATEKSAQLVNNGKILLVTAVIFDIVATLYMIFNAGASVGHFNYKLPLLMQVIIFFSCYMPAILYIIGAKRNLPREYVLNELMISFSLFLLGXXXXXXXXXXXXXXXXXXXXXXXXXXXXXXXXXXXXXXXXXXXXXXXXXXXXXLHFLLKICILMYHLIYRLKSKEAAKHLLDSVESIYDRLVENPYQFPKSRDMYLAKKGYYEAVIPQMNYIVIFDVRKNIVNIVGIFHQLENYLSKLDNARLVSNLHANLGGLYRMNGHPDLAREHMEKSISLLDQFNLLHINDSIPQIANYAMFLTEQQEPERGISELQKLSGIIKEYHSDELQKLSGIIKEYHSDHCLDYAKVQETLGTIYLMTANLPQAKTHFKRAFKIYEKIWEIDNLERSYSTVMPDGETKVYSVLRGISFQVKRGEFIGIMGSSGCGKTTLLKTIGMLNKPNGGKVLYNGEDTTEIYGDHLAEIRRTQLAFVFQDFYLMNSLTVRENIMMPLILNEDDPVESSKTAETMAEKLGIYKLLDKKPYELSGGEKQRTAICRAMAENPELILADEPTGNLDSNSSKQVIHTLSYINQEFGKTIVMVTHDPQMASYCSRLILLKDGVILEDLKNSGNQMARAVKKDYNKKALQYVCGTCLLFFVYYVYMQDTKLLFLRDTFTLNTAMYFGSSIVKMIAIMCLLMFYLEDEKITWKMVLGVFGISVVMISKSTIVLPTLFITGVSYVIVTLLFTKEWKQKIIGIILAAFIVLAGIILPNNQGAQNEVYQYVFNALKSPFVIGALAVFGCSFFARKRVIYKINTMVILMGLLFVIPQLNDISEFLAVYGFVAGRAWSTYVYTFLIINLWYVYLFMSKILNETCVKIIFIAITCGMVRLLFYGYETDGKELFVTDNMEAKTNLEEDFDVLYRNHKFEPDTSIELGKELERIGKEKKKKLFVVSPEWALVDNTIYTLSVQLRSVAPDVVSVSAVNRYEVDRQCQLYGYDQEIYEKFVNEPSDESSRKLSKQVKKYNINCIIVQNKDCENYLDKIGFKQEAVIQGGVYYVWYKSARMTRYIENFKKFQPLLYELVARDVKIKYRKSVLGVLWTLLNPLMMMIILSIVFSNLMKFDVQNYSLYLLCGQILFNFYNEATSGAMTSILGNAPLIKKVYIPKYLFVVSRIASSSINILSSFCALILVMLFTRQELHFTMFLVVIPLVYLIVFSMGVGLILAALTVKFRDIMHLYTVFLTGLMYLTPVIYPMSMLPGWVYKIVSINPLTMIMVIFRNVVIYNTIPSVGEFIVPLIIVIVTFFLGLWVFYKQQDKFILNLMDQDTIIKVDHVSMKFNLSSEKVDNFKEYLIKRIKNNLKYDEFWALTDVDFEVKRGESVALIGLNGCGKSTMLKVIAGVLKPTKGSVSVGGTIAPMIELGAGFDMDLTARENVYLNGAILGYNRAQMNEYYDDLVEFSELEEFMDVPIKNFSSGMLARLAFSIATIGKPDILIVDEVLSVGDFRFQEKCEKRIQGMMKEDTTILFVSHSIDQVKKICKRAIWIEKGHIRDDGPSDIVGTEFERAYYAGELSEMKTIKKIGIAIIIIIIGVAYAYGTWPRPIYNTDIGSLSYEKTDFLTTDSTMEQKFVCGNNGFSGFTIKMLKQDGQNIGNYRWTVEEVKTGKTIGKGTISEADTETRLFESSNPQKQGMVNVNFPKQQNSKGKEYRLTLQAEEMEDTESVAVYITEKNSTESELKVNENAMTDKASVVKLNYKRFNVETFIVFLGIAVYLWTFIKFMYKLFRMDVTIVIPTKNAGRLFEKVLKKVFAQETTYEYEVICVDSGSSDNTIEIIKKFPCKLYEIPASEFGHGKTRNYGASKGTGEYIVFITQDAMPASSKWLQNFIDAMKSDPEIVGGFGIHYPYPDCNVIDKRDLYYHFKNFGDDNTIFQITDENRQRYKEEEGYRHLLSFFSDNNSCIRRDIFEKYPYKDVSFAEDQIWAKQMIELGYKKLYCPFAPVYHSHNYKLSTYFMRYYDEYKGLYYLQNYQIAKSWTRLPLMIAKHTISDARYIRHLEMSKKEKIHWMLYSMSRNFSRYCGGYLGGKYDSYSSKKKKWLDHKISQQYKQRKAMTVQEFCKKIIPFLKKRGIKGVYRKLLEKAHVIPTKNHFLEDYEFLVDDVKIPFDEKEYEIHKDDELKILNWVIPEMGKGSGGHLNIFRFVSFLEKMGFHSRIYLFKAPTLQDNESVREFLKENFPILDERVEAYWDVKYAKFAHATIATSWETAYFVKNFDNTVSKFYFVQDYEPFFFPHGSYYELAKNTYKFGFRGITAGDWIKDKLIADFGMKADSFGFSYDKDMYVPLKKKGTTKRVFFYARPVTPRRDFEIGLFALDLLCKKMPEVEVVFAGWDISTFEIPFKHRDMGIMSVDKLSKVYSQCDLCLILKNEPSVLLVDIGGWTVDLMRLDNAVPNAATCRSLELGVIRCIDETAEQVRRNTGLSVTETQIERVLRGESCSMAEEARRIIQENGRRYIERILSAVTEAGFDLRAVPTVFMGGGSAILKRHVTAQDMTLGDMERLTYLTEFFELENYGIALWKEFGDDVKEPFEAMMKMLDEPECIEDRWLDDEAKGEKWLLEFQELALTEEYREWIRNYIDKKYEERGLPYPTGADFDMEVSIYELLAAARESAKSDYIKGDSILCEKRFHPDTHYMVEIMATPMFIVTGFLDSGKTTMIKDTLMEQEWIEPGLTLLLLCEEGEEEYPEEYLKEKNMAVLKIEEFDQLNTVFFKNCERNYHPAQIIIEYNGMWKLEDLLSIRYPRSFELQGVYSTVNGTTLDMYLMNMRNMLMEQLTESELIVVNRCADGVNRSGFRRALKVQNPMAQLIFEDMQGKIIEPSEEDLPYDVKGDKIVLDDVDFGVWYVDAYDHPELYLHKEIDFKGQIFRPKGMPDNMFVPVREIMTCCAEDVRYYGYPCKAEKKIDVKAKSWMQIRARFEYEAVSSFGNKQPVLYLIDMEPAAEPEDKVVYLGMTKVDIISGFLGAGKTTFIKKLLSDVWAGEKLVLIENEFGEIGIDGGFLKDAGIEITEMNSGCICCTLVGDFSKALVKVLDEYHPDRVIIEPSGVGKLSDVARAIEAVEKDADIEIDGRITVVDGKKAKMYMKNFGEFFKDQVEHASTIVVSRTQMMTDEKVEECVHTLREENAEATIISTPWDELGKEAISHALTKGAEIESLFEDHEDHDHDHDHCDHDHHDHHDHDHCDHDHHDHDHDHCDHDHHDHDHHDHDHDCCCGHDHDHHHHHHADDVFTSWGKETVHKYTEEELDYLLKALSETTSYGTILRSKGIIQMTDGSWKQFDLVPEEYEVREGQPDYTGRICVIGTDLKEDDLLKLFHVMEMLLYLVPVFGILGLLFAAYLAARVGRQDAGNDRMKEIAAAISDGAQAFLTAEYKILIIFVAVLFILIGVGIGNWITAVCFVVGALFSTLAGYCGMKVATKANVRTANAAKEKGMNKALSIAFSGGAVMGMCVAGFGVFGVSMIYILTKNVDIITGFSLGASSIALFARVGGGIYTKAADVGADLVGKVEAGIPEDDPRNPAVIADNVGDNVGDVAGMGADLFESYVGALVSALTLGIVYYKAEGAIFPLLIAGLGLVASILGTFFVKGDENSNPHKALKTGSYVASALVLIVSCVLSKVFFGDFKAAIAIVAGLIVGLLIGIITEVYTSGDYKSVKEIAEQSETGSATTIISGLAVGMKSTAIPILLICVGIFIAYQTCGLYGIALAAVGMLSTTAITVAVDAYGPIADNAGGIAEMSELDPHVRQITDKLDAVGNTTAAMGKGFAIGSAALTALALFVSYAEAVHLKSIDILDSRVIIGMLIGGMLPFLFSAMTMSSVSRAAYQMIEEVRRQFKTMPGIMKGTEKPDYKSCVAISTTAALKEMLVPGVMAVLAPLVVGILLGPSALGGLLAGALVTGVMMAIFMSNAGGAWDNAKKYIEDGNHGGKGSEAHKAAVVGDTVGDPFKDTSGPSINILIKLMTVVSLVFAPLFLSIGGLLMKRIRIFVAYDGTNYCGWQVQPNGVTIEEKLNKSLARLTGEEIRIIGASRTDSGVHALGNVAVFDTESSIPPERFAYALNQRLPEDIVVVRSDEVPADWHPRYQENISKTYEYHIYNAAVPNPLKTRYCTFVSFPMDVEAMRAGAKYLVGEHDFVSFCNIRTNTQDTVRTVYDLIIEKKDDEIVLRITGNGFLYNMVRIIAGVLIRVGRGFYTPEKVKEILDAKVHTSEGATAPPNGLVLMKIDYNMIRDITIGQYYPAKSVLHRLDPRVKLVGTLLYLISLFLFNSIPGYVMTTLFLIIIIKMSRVPFSFIVRGLKPVIMLLMITVLFNLFLTRDGAVLFHAWIFTITEGGLRTAVYMAIRLIYLIIGSSLMTFTTTPNELTDGIEELLGPLNKIHVPVHEIAMIMSIALRFIPILLEETDKIMKAQIARGADLESGNMIQKAKSMIPILVPLFVSAFRRANDLAMAMEARCYRGGEGRTKMKPLKYHKEDRMAYITVIAYVILVVVIGRCVPVHIWVFMTDIAIKIEHLNYVYSPGTAYEKHALKDICLEIPHGEFVGIIGHTGSGKSTLIQHLNGLVKATDGALYYNGENIYQNGYDMRALRNQVGLVFQYPEYQLFEIDVLTDVCFGPKNQGLSKEECEKRALEALKLVGLKEKYYKSSPFELSGGQKRRVAIAGVLAMRPKVLVLDEPTAGLDPKGRDDILDQIAYLHKQSDMTVILVSHSMEDIARYADRIIVMNKGSVMYNGAPKEVFAHYQELEKIGLAAPQVTYIMHDLKEKGLPVKVNVTTVEEAADEIMQALEKKIMEMIQTEKLVYEYEKRDEEGNVIGTSRAIDEVDIEAKEGQFIAVLGHNGSGKSTLAKHLNAILVPTEGSVWVNGKNTSNPEELWDVRQSAGMVFQNPDNQIIGTVVEEDVGFGPENLGVPTDEIWQRVEESLKAVGMIEYRHHSPNKLSGGQKQRVAIAGVVAMEPKCIVMDEPTAMLDPVGRKEVLKTVHKLRKQKNVTVILITHYMEEVVDADKIFVMDHGKVVMEGTPKEIFSRVDELKSYRLDVPQVTILADELRKRGLDIPKGILRKEELVEAITHLQQMTNPIVTIEMENGDIMKAELYPEVAPNTVNNFVSLVKKGYYDGLIFHRVINGFMIQGGCPDGTGMGGPGYTIKGEFAQNGFANNLAHTEGVLSMARAMHPDSAGSQFFIMHKAAPHLDGAYAAFGKIIEGMDIVNKIAETDTDYSDRPLDEQKMKKVTVDTMGTEYPEPEKAMKKRIMTAGMLAMILAMGMTACANADTKEKSTTKKEQVSESDEKKEQKKSDNEAYVMNEKQKKIYEKIKKTYNAEEQQKIADELEKKKESQEYTLSNMLIEYNPFGTNTQSLYVYFETDSAVKVSYTIHVKEDDIADFSRNVYQDEEYQKEHEFQVIGLIPDTENTITFYITNEDGSTDTKEIVYEMGSLYGEEAVQLDTDVKQSADKLEDGLYVVLGNDSTSMDFMYYYDNNGVLRGEVPLLGYRSHRLIFDENSMYYSISEKKMAQVNRLGQVTKVYDLGNYKLHHDYVFDENGNMLILATDTTQDSVGDIVLKLDVNSGEVTEVLDLGDLFGEYKKTCVKNSSDELDWMHINTIQYIGNGSVLLSSRETSTIIKVDNIYDGPVVSYMIGEKDFWKDTSYVSLLLNKKGDFTIQGGQHTITYETDESLADGQYYLYMFDNNIGISETRPDYDWSSIGLKVSSAVDGKNSKYYKYLVDENEGTFELVDSFKVPYSGYVSSAQETGDNVLVDSGLKGTFTEYDADHKAIVTYKMDYEKFIYRVFKYKFDGFYFEKSEMKKELEYFMIDGEFGGNQDWFTNIVMNVGGCGAATACDSCIYLAKYKGMKKLYPFDLEQMDKEAYKKFSQIMKPYIRPRVQGVKKPEWYIEGLAKYISDVNEKYGTDYQIDMEKFDGTGTAEEAEKIICEQIDKGLPVPYLMLRHLNVEKYKDFIWHWFLVVGYEKNEQGMWIDVATYGEKVRLDLMELWKTGCEEKGGIVIYELKNTEVQSKNEMKLGFIGTGNMASAIMGGIIKNNVIPAEEIIGADLFAPGRERVQKEYGINVTADNKEVAQKAETIILSVKPQFYESVIADIKDVVTDKQIIITIAPGKTLAWLAEQFGKDVKIVRTMPNTPAMVGEGMTAVCPNEHLTEDEIAYVKSLLESFSRAEIVPERLMDVVTAVSGSSPAYVFMLIEAMADAAVSGGMPRKQAYQFAAQAVLGSAKMVLDTGKHPGELKDMVCSPAGTTIEAVRTLEELGFRSSIIEAMKVCEEMSRSLMAEKSPSLATQAYHTIKENILNLTYPPGMVLTEAMLTKELEMSRSPVRTAIQMLQVEGLIVSDYYKSMTVKEITDKDINEIYQLRELLEGAAFRQIFTSGRYEEYSYRIEEKVVRMCAAAGDLYEWEIADTAMHMEIISIFDNDRINRIYENNLSELIRIGQYSIRNGMRISRTNDNLKKMISYMRKGNYEKAFEILKNDHFGTGRNTALKMHMEIETDNKKSVKGRIVTAAWQLFYEKGYNGTTVDDIIELSGTSKGSFYYYFNTKDELLNTLSIILDDNYEVLKTKMDPDMNCYEKLLYLNYEAHSMMEEKISIDLLASLYSTQLVAQGHRSLLDQNRTYYKLISSVIDEGQKRGEISDEVPVNELVRYYSMCERALVSDWCLNKGAYSLGEYSKQCMPIMLEHFKKMSEVRKHMIFHGRVQGVGFRYTAKYLARSMNLTGWVKNEYDGTVVMEVQGSETLIFELMKGLNRNQFIQIDWIDTEEMEPELESSFEVKYMINKAIEFATRAHAGQFRKGTRRPYIVHPIEVGDIVSTMTQDEEIISAAVLHDTIEDCEGVSREILARKFSERVAGIVAQESEDKTKTWMERKSATIEHIRNAPREVQMVGLADKLSNMRDIDRDYPVYGEELWNRFRMKDKKIIGWYYIGIRDALKDAFEGVEAYEEYSRLVHKNFEMRLKGTAGGGVQRQLFFYYILKLLSFKVSGDIIYILKTMEQKTIFITGASRGIGKSIALLFASRGYHTFLNCSSSVDELKKLRAYITEKYHTPCTLVPGNVGNPDHVRAIYNKIYQECTHLDVLVNNAGISYINLLTDMTDEDWNRIIQTNLSSVFYCCRQAIPPMVSKRSGKIINISSMWGTSGASCEVAYSASKSGINGFTKALAKELAPSNVQVNAIACGVIDTSMNDQLTSEERKALEEEIPAGRYGTPKEIAQMVWNIVHAPEYMTGQIIGVDGGFLMKFISWNVNGIRACAQKGFMDIFNEADADIFCIQESKMQAGQLELDTPGYHQYWNYAERKGYSGTAIFTKEEPLSVSYGLGIEAHDKEGRVITLEFEDFYFITVYTPNSQSELARLDYRMRWEDAFLAYLKKLEEKKPVIFCGDLNVAHKEIDLKNPKTNRKNAGFTDEERGKFTNLLNAGFIDTFRYFYPDAEGIYSWWSYRFSARKKNAGWRIDYFCVSESLKDRIKDAKILTEIMGSDHCPVELDFEMRTYKLTISYDGSRYQGWQRQATTDNTIQYILEWSIGKLVGYRVHIDGSGRTDAGVHARGQVASVKLSKLYDTKELKDSLNRYLPEDIRIVKVELAKNGFHARKSAKGKKYEYYIDCREKPDVFSRRYCYHYPEKLDIEAMRDATKYLIGPKNFTSFTDDKECKDPIRKITNIKIVSSGEKVRITYYGTGFLYHMVRILTGTLLEIGAGKRDASMLPVVIAAEDRSLAGFLAPARGLFLRKVYYMKCPYCNNPDTRVIDSRPAEDGSSIRRRRSCDVCGKRFTTYEKVETIPLTVIKKDNTREQYDRRKVENGVVRACYKRPVATADIQKVVDRIETKVFSLEEKEIPSSAIGEAVMDELKALDEVAYVRFASVYREFKDVSTFMDELKKILEMAKVRLSEWKKKEVINCCDCKKLGYIEDLIIDECKGCIEALVVPEGGKWCNFFGDGTEYIIPFSCIKRIGPDLILVEIHEEKMEAKVIDGCISCGACIATCPEVFRFDEDGLAEAYAKVTPEHESAAIEAKEECPVAVIMIEEMKKRVVVALGHRALGTTLPEQKEAVKKTAKVIGDLIEKGYQVAITHSNAPQVGMIHTAMNEFAKEHEEYTAAPMSVCSAMSQGYIGYDLQNAIREELMNRGIYRTVSTVLTQVIVDPYDEAFYTPTKVLGRYMDAEEASAERKKGNYVVEEPGKGFRRIVSAPNPVNIVEIDAIKALLDADQVVIACGGGGIPVLEQDHRLKGASAVIEKDLTAGKMAEETDADELIILTSVEKVKINMDRPEEEELGEISVAQAKEYMEEGHFGKYNMYPKFRAAVEFLEKREGRSALITSFDKFDEALKGKTGTVIRMKGIIFDVDGTLWDSTEMVAVAWNKVIKDEGIEHKELEEKDLKKEFGKPMEAIGESLFPEMPKDEMMKLMEKMLKYENGLVAAGPCVIFEGVQETIKKLSEKYPLYIVSNCQDGYIEAFLQYSKLGEYFKDFTCPAYTGRLKGENIRIIMERNGLSEAVYVGDTQGDANSCKEAEIPMIYAAYGFGKVEKADASIQSFDELLDMDFDRLMTLGEKIYKLRTKRSMTQEQLAEKIGVSRQSVSKWETDSAIPDIEKLKLLAEIFEVSITELLGMECEEDTKRKDEKERIEHCQKEIKRWKRYAIVLIAISAVLLAACIGGSIYVRYFIIEEKSNNTEAQTTQIVQQETDEDSEQIGRPKGIISEFYRSVRCSEDGKIYLKLKCVLVQDSAETQMTGLVKTDESDGNISVDMVKKENGYEGEAEIPVSYLENPVNISLNIDKSGEKQNVVIDTDSTEYLLEQIDWLPMADLEADETGNGEYQSGYLNVRASEQKYMKNVEDVKLEMKIGKKKVFKKELSSREWKDLKNHGQMGYSYEYKNTGKLYDDYTDGKIIIKIKYYNKELKKNVEIWINPWEGIESREKILLKDMKVIVIGPRGKMGKLITQVAASRDDMELVGAIAPKGRDYIGKDLGTVAMTGFELGVPVTDDLENIIDSCDVIIDFSTKEMAMEVLDLAIAHKKALVCGSTGFSAEEMKRFEEAGKQIPMLYAANTSKLVNIMNKLLELVTATLKDEIDIEILEMHDQWKKDAPSGTSKEMGEIMAHALGKELSDIAVYGREGESPREPGTIGYHSLRAGNIPSSHTVYFGGMGERLEITHHSYNWECFARGACDCAAYLEGKGPGFYSIKDVLGIMAVIHLSKDNFNEEVLESKVPVMVDFWATWCGPCKTMAPIVEEIAEERTDIKVCKIDVDQEPELARQYRVMSIPTFLVFKDGEVVKRDMGVMSKDELEGLIVMEQIRLENEQIEVTVNIHGAELRSLKSKADGQEYLWNADAKYWGRTSPVLFPFVGGVKNKVYRHEGKEYPMNQHGFARDMDFTLISRSTDEAWLALEDTDETRKVYPFHFHLEIGYRLEGTAVRVMWKVKNTNEKNMYFAIGAHPAFFCPVREGEKQSEYFLKFKDGEGNAPESLTNTVFGEDGVVTTQKKEYKLTDGFLSIDEHLFDGDALVIEGHQIQRVALTNPQRKEYLAVEFDAPLAGIWSPPKKQAPFVCIEPWYGRCDSERFDGELKDRDWENALEAGGEFEASYKIIIEMTGLSTLCYIEKDNKYLMLHRIKKKNDVNEGKWIGVGGHFEADESPEECVLREVKEETGYTLTSYRFCGLVTFVSGDGVTEYMSLFHADGFEGEQIACDEGVLEWVDINKIQDLNLWRGDKIFLKLIAEKVPFFSLKLVYDGHDGLVSAVLNGTELDLEKVMNRTIEYLITEKEDGLRIEQFLRRKGYSGQNLAEIKRMPKSILVNGVHYYMRQTLTAGDILKVIICETKCSEKIPPVEIPLDIIYEDEDIIVINKPAGMPIHPSMNNYYNSLANALAWYYQKQDKPFIFRCCNRLDRDTSGLTVVSKHLVSGSILSTMTKNREVHREYLAVVKGRVTPSSGTICAPLARKEGTIIERMVDFEHGEEAITHYKLIREANGHSLVSLKLETGRTHQIRIHMKYLGFPLIGDYLYNPDMEHMTRQALHSHHMEFAHPITGEWMSFTAPLPADMANVLKDMIVKLIEQVYSFLWGDLLQIPLPGGGSVGISLLIILLIPAGIYFTIRTRVLPIRLFPDMVTVLTGKKEDKNSLSTFQTLIVSTATRVGMGNLVGVVAAVSAGGAGAIFWMWVTALIGSSTAFIEATLAQIHKEKDPLYGGFRGGPAYYIHDYVEGRTGKKRKCVLPAVLFAISGLICWCGISQVISNSVAASFKNAFSIPPLYTTIVLVILAAIIVLRKNATVKVLDLMVPFMAVCYFCITIFIIITNIGSLPGVFARIFQEAFGIRQVAAGGFGAVLMNGVKRGLFSNEAGSGSAPCAAAAAECDKPVKAGLTQALGVFVDTIVICSCTAMIMLLVPEKLVAGKEGMDLLQTAMRYHLGEFGVIFIAVTLFLFSFSTFLGILFYARCNVAYLFGDKWCWQTAYKVLALVMLFIGGIATYTFVWDLGDVGIGLMTIFNIAALYLMGGQALDELKAYEESKKMVILNDYLYSGDTVLRILHNYIKDLRKDAKKTGNEIDMIHCNFLLQIQELLEHNDFLTAQSQKMREFYKYMAKEYPFMAFTFKGRIKSLIRAEEKFNGYVVEFIYDYYEEHGKYPSIAEVKKRLSCFRDLIAYRIIISVPRCHLNSEEDREEQERKYLYQIANVLPGFLEEQGFSAEPAMGIKESTSPLLNESVKPYYRDYICSHSSNNYQSLHITFYDNSSRCYMEVQLRTKMMDDIAEIGSANHIGYEKEQEHERARRDAIPEGECLYFDEAYERGMKLLNLKLAELDVNMFSAVNNSLINDGCGLYRGRLILPYEHLSRFQNDLIDMKRVDFENGTVTGNILGAALPMLVAQILNLLYNIVDRVYIARIPEVGTKALGAVGICFPLIVIITAFANLFGGGGAPLFSISRGKRQEREAVCIMNTSFSMVCVSGVILMVTGLLFARPILILFGASKSALVYAYPYMMIYLLGTLPSMIAVGMNPFINAQGYSVVGMLSVAIGAVANLILDPLFIFVLGFGVRGAAIATILSQTLSAAFVLFFLTGKAELKVRFLRKNEISECTGYAKNIVSLGMAGFIMQLTNSLVTICCNNVLSVTGGDIYISVMTIISSVRQLVETPIHAINEGTSPILSYNYGARRPARVRKSIAVLAVMILIYTGVMWGSIIMIPEVLIRIFSSDKTLMKDAVPALKQYFAAFIFMDLQYMGQTVFKSLNKKKQAIFFSLLRKVFIVVPLTYLMPYVLHMGTDGVFLAEPVSNVIGGSICFITMLCTVMPELKRMEAMELKQLEYFRTIVDAGTISGAARDLHMTQPPLSYQIKMLEEELQVPLFLRGKKRITLTEAGKTLYEQAGNLLMLSDLAKREVIKSSQSATLHIGMTPSTVSMMSDHLLHFAKKYPKVRFDVHEGSTFTLKDQLENRIIDLTTLRTPIALNGCETKPLLKESLMAMSIPDSPLLQERSSIPLKELSRQPLILSYRYRKYMLAAFERAGLMCDIYFTCGDARTAMTMAEKGLGIAILPASMQTLSSKLTSCRISGADLTTEILLAWRKEQLPEEIQDFLKMWDMNYSECIENARTRIGNYCKACPECNGRACKNQMPGPGAKGVGDTAIRNYDKWKEIRVQMDTIAENKPVDTSQELFGKKFKYPFFAGPVGAVGLHYGDCLDDVAYNDILVSSCAKYGIAAFTGDGVDSNVMVAATKAIKKTDGIGIPTVKPWNLDVIAGKMEMVHESKALAVAMDIDAAGLPFLKNMEPPAGSKTVEELRQIAKMAGTPFIVKGVMTVKGALKAKEAGASAIVVSNHGGRVLDQCPATAEVLEEIALAVGDSMKIFVDGGIRSGVDVFKALALGADAVIIARPFVTAVYGGAEEGVKSYIEKLGTELEDTMKMCGVTSLEEIDRDCVWTRSMKKNEKIRTPLGIISVFKNEIPERYHCAAEPEILRISETHIRIRTIDQAVSWGEEVYSPRLHQNCMNPENITLYPLEIEWNGDKVTVSDHYGMKRWITGEKLPEIQDWNLKLKKLRCNPCRNCGRCMKKIKWGVIGTAGIARSCTIPGMIQAYNCELYAIAGRSIDKAEQFKEKFGFEKAYGSYKELLDDPEVEAVYIALPNTLHYEWAVKAMKSGKHVLCEKPLAPCEKQVKELFDKAKENHVYLMEAFAYQHSPYITAIKKEIEDGTIGEVRYIDSAFITSDYNKENIRMRRETLGGCTYDLGVYSTSLTLGLLNEEPAKVEASAIFSEEKIDKLTSVVMEFADGKKAAFTCGMTFATDQDRRLDRLEIDGTKGSITGTKFSFNGDGELSYTIRTAEGQEEVKTVEVPQNYRLEVEQFGRCIDENEKPAVTEEFSLKNVRLVERILEEIGYMSNIWKSVFCIGTGNEAASAGHTSGRIISEGEETIQLAIQSRQSSISIQIWKEYTDQIEISIINPSGVRVGPVPEILGPHRFRIGQTEILLYYGEPSPYSISQEIYIDLLPVESYLTEGIWRIVLSAGKIVTGQYEMWLPSDNVLNRGTGFLFPTDATTLTIPSSASRAISVGAYDARTFAYADFSGRGFTRLTNMVKPDLVAPGVEVMTTTVGGGYAAFTGTSFATPFVTGSAALLMEWGIVRGNDPYLYGEKVKAYLRRGAKKVPGFDEYPNEEVGYGALCTAQSIPQIMSREKRKLRKKFIVFCEGDTEYNYIDTMRLNQGVELALKPINMHGGGYSNFLEVIKKEANNNCLAKFIVIDYDRVKKHPGELAKLKEIIEYCKLQNSNKRIPHFLILDNPDFEYIACLHILEYQGQDVKKFIEQTLGFKNIDNFKAKKDVYEYLNTKGNSYNIMLDRLKEYIVKNSYNINKSNFDIRITKTDVIWDNENKRGSNIREMFEIIDWMLLSYKFNNFCSFDENAEFELLAPSNKVKNRFPDNYVVTDAGYDVLKVAVVIGENAGGKTNFINSLSYLKSMFEDTKAKHSYRPLINVNNLKSECPAQSNTKQEFDICIIGKSELIYHYNLQIDEFCIVEEKLTYRSKKSNQEKVVIHVKREQLNRMEEKKSIAASYDLNMDNCDENVKKILDQSFFNKGELGLFVSKLAILGDMYAIEFVNWMNEELIVESKNFNYYLYKNLQTQDDDLRIIKDNRFLDILRMVDYSICNIEIDDEKPFRKTKVVRKMKNGKYFSRELGMDSGGVGEFFAWAVQLFRVVYEDKTVFADEMDRVINPILAERIVAFINGNKHRGQFIFSSHNILHLDLKNYMKEQIYFVTKNRDTLNSELYSLADFPEIRYETTKIYEFYMKGILGGTAFEMYQMAAYCRLSKDDGENKISESIENQMKLIREYVGKSNDLEIADIYIDDGYSGLYFANRPEFQRMMEDIYKGKIQGVITKDISRLGREHIETSNYIERVFPSLGVRYIAILDGVDSAHHSNEELAQFKTLFNDMYSRDISKKIRGALSAQKKRGQFMSGFAPYGYMKDPADKHHFLIDEEAAKVVRRIFYMSLAGYSRDGIARKLNQEGIMTPSEYKRKVQGLNYTNALEKSGGKGWAYPTINVILRNRVYTGAMVQHKSEKISYKVEKYYYIPEEQQYIVEGMHEAIISKDTFEQVQEIMKKRTRTPGFHSEVRKVNPYAGILVCGDCGYNLQRVTCRDGYECGTYHKKGNTICYSHFIKKEILDFIVINEIQRQAELALKESDKDEILKAADRRKEVQRRCAEAEQQIEQLQKELAAVQKYKKKTYENYVDGVLDKEEYLSYKAEYEKQDKVIREKIQMAEQEKDSFGEAEESYENWIEKFIKYGTLSEVTREIVTELIEKIVVNGDKSIDIVFKYQSPYPVEKRAVMYQAGIYCRVSIEEQNKEGEYSNSIHSQIQMARDYIAEQNDITEARVYADDGFSGSNFDRTEFRRMLADIELGTINMVIFKDVSRLGREHIDTNYYLGKYFPEKRIRVVSLLDNYDSMVSTYDELLEIKTLFNDMYLRDTSRKIKTTIQTKRSMGEYTPKQPPFGYIKSETVHNHLEVDPYAAEVVGRIYKMYRNGFGCSVICRVLNEDQIPCPAKYKKEVLKNGYAWDVGKGLWTPATVRGILKNPIYTGAVVIRKSNRPSYKLKYKKAIPLEEMELVPDAHEAIVSKEEFDQVQQIRQERRISYFDRNKEPHKYVGLLFCGKCKTAMRKRYLASHNGYDGYMCGFHQKMGKNYCELNHITFEKLDELVVFAINQQLKQMRTDLKNLETQIGQRKPEVDSKITRLQAKIERNTEYRKRAYEQLMDEILSKEEFLELKQMYENENRQYQKELEKLKQEEQKQQTAVNTTKVWLNNFSRGKLTVKQLTREVLEELINKIYVYPDQKIDIYFKFASENNSVDVTIQKDGVMMNTRFSSGNIENLEAEKEIQKEAVSYEHAGYQVRVHFNGDKTLSQCIQNLAERKIAGMSQPDFLYELFEDFMDDPANQDFSMDNGLVCRWLTGQAKISPKISAYYSKPSNQKKLAETIHQNLLPLMSDCNMAMQDIYTLFIQDDTISDAKKKNLASLYKPASSRLLFLAKLISFGMERQFIKRDTKNQKLIAGGALSPIVLDYIMDSEVPKPCRHFIGRDKELEELYTMLEENRHVFLCGIAGIGKSELAKAYAKHYKKHYTNILYVEYTGDLHQDITDMDFIDDPPEISEQERFQRHNRFLRSLKSDTLLIIDNFNVTATQDSFLSVVLKYRCQILFTTRSNLNEYCTFQLKEIKDINILFQLTSAFYSEADKYRSTVEKIIETVHYHTFAVELAAKLLENGISTPGQLLAKLQEERASLDNEDKIKIIKDGQSSKATYYSHIHTLFSLYALSRKQQDIMCNLCFLPYTGISARIFAKWLELPTLNEINDLIETGFVQTTTRHTISLHPMIKEIALSETKPSVSSCHILLDSLQKICLMHGIEVDYYKKLFQTAGNIIELIEKDDIPKYLLFLENVFPYMDNYNYQKGMKEIIQELKNFLKPKDIGTDSDRALLLDFQATLEIKPEKAIKLEKDALAQIENITADNARLVSNLHANLGGLYRMNGHPDLAHGWSSYGDPEYVPHVMRYYSGGSLFSGLFGNQQIVSVAMGQIGNSGGQKFWSWYGFDSHVEWCACFVSWCADQSGLIASGNVPKFSLCSDGVTWFQRKNKWQSGGTTPSAGMIIFFDWDHDGTSDHVGIVEKCEGGMFRKSKIEPVEKVKIVERYLAGEIGIQQAGKELGVDHHSIRNWISIYQYDGPTGLLNQPKNKSYSKDLKISAINDYLNGEGSLQDICTKYGIRSHRQLSDWIKVYNSGGILKTSTGGAYMKKAKNTTLDERLKIVTDCLANDKNYGAMALKYDCSYQQVRNWVIRYEKMGQAGLEDRRGRRIASLPSRTPEEELRDKIAELERRNLDLQMENDLLKKVRELERRGRYLMGYRRIRDELDGHKGIHVNDKRVLRICRKYDIKSNIKWKPKSCTRGDRNPDHIAKNYLHREFHAEKPNEKWLTDVSEFKYYNGIEVHKVYLSAILDLYDRRIVSFKISDHNDNPLVMDTFDEAVRQEPDAHPLVHSDRGFQYTSAQFYTRLKKHHMKQSMSRVAHCIDNGPMEGFWGILKREMYYKQRFNDRSSLITAIANYIDYYNNQRLQRKLHVMTPMKYHEQYTKAAMDSKSGKIVIDALNKISSEYKKTIVMVTHDPQMASYCDRIILLKDGKXXXXXXXXXXXXXXXXXXXXXXXXXXXXXXXXXXXXSNRETFYQTILSKMAELMLHKIIYKNFKSNIRKYILFFVSNIIAVVELFIFWGLNDVVVRAVTEPSIMMGIKSDFVIAVGLITVVTILLMVFSMRYYIKLRAKDYGTFIMLGMKKKMSYMLLFAEYIIGCIGSLLIGILSGNLLLYGILYCLNQYNPQIITLQKVDPVVYKNTILLCLGVMLGIFIILLVWMDGRNLSSLMMKEEIKEKRPVSSKWLLFTVLGIVFIILAIKQYKPGTWGYYFAHIYFLIGGILIITFSGAFILEQAKKEPFYFRYALKINQLDSKYQSNILIILMLFVIHFFALSYIGTQIVEILPLDKTNSNYPYDIIWMARQNDEKYSEKIAEKYNGTVKHIPMIRATMFYSQEEIGISESTYKELTGKAYGLSGKEIVIGIEDQNYQREEKVTDKVLYDLFGWLYIGKFNPNKKEFESSNILKDANYQYRIKEIHTQNVFGKFVPEDAGEGCEDTVIFSDEYFDKQWEKQVADDEEVSMLEAFSFPKTKEQMAWKEIKCHADKEGITVFQPDDSHSPHAICYDKTVFLKEQKASNIFLLFSKLFILITLLISCAFIMVVKNLAEMSSYQRRYEFFHSMGMKQKEQKKILSFEICSVANIALGTGICLALLYVMTYLHWYDAMGEKISTTFWIYWLKLVGIYIIIQIVVQKLFVRYVNKRIMTEKALKPIKPFLNYEEQINNLIEQKGMIVNDHKFAVSKLEDISYFALIDGYKNLFYNPMTRKYKEGTTFEDLVALYEFDEKLRTLIFRYLCHFEQKMRSLISYHFCDTYSEKQEDYLNAVHYNNSGANKKKIAALIAILDREAKKSTDHAYVVYQRKTYGNVPMWVIMKTLTFGQMSKMYSFLTTSMKTKISRHFDYVSEKELIQYMKVLTLYRNVCAHNERLFSYKSRFDIPDTILHRKMKLPQNGNKYKCGKNDLFSVVIAFRMLLAKEDFAEFKKSLNQIINQYMKKTGNLNQDLFFKAMGFPENWKNISRYKLMDFDCIYKSYYLDVYHFLCGLSSNKEIAEDITQETFTKALTAINSYDGRKDIRAWLFTIARNTYFTYCKREKIYVEWEPPTEQVDIQTEFIDNLINKEQVEKIHNFLKNMKDPYKIVFELRIHGELSFEKIGRIFGKSSGWARVTYYRAKMKILEYMEAENNEMNKITCNVIKDILPLYIDGVVSEDTQKIVDEHLAECSLCRDEMNKLKKTLVIPTNEEIQQETVNVLEKSISSIERTVVKKFIHYSSYFDLIFNIGMIPFIYWLYVIWIKKETSLLNIYVFIKKYSRISGDLLSFALFFVIFICCDIIHIVLTMKKKQLNIMDSVVVMSIMVKLFLILILMAFLTAGILMMFKVIWKSFKYNRKNFLSFFMSEILSVAVIFMLIYIQEALSQVPGIKTEALQFAYQSELRKQLRIIIPCIILIMILVTGYSVKAYINTRIWDYKLFQLLGIRKKNLKVMIGLEYVISGMLACGFGILFGLIGTKIIKEILHTRINARFVKGISMSRVYLVLILSCLIMTIGVYITLQILLDTRTNLGDKIFKIKESRIHSMISVIYFIVGILVISSGYLLVNNDPMMAYMALICILTGLIILMIFGTGFFMEKFSESKYYKKHILAWNDCYCYIKKHGFRMLIQILLGIILIFNTFLMLRGTIHDRYMPNDFVCIGNSKETTAVNTVVTARFNGLTKQFPFLWFNEMRGDSWVAISLSDYNKIYNKNESLNKNEIIRIWRKEGSRKSDLSDKQHRKIKSIALGKCGNMDEEGLEYKYNFQIKKEQIKEMIGFSMTGLVIIPDNIFTQAEKESDYKKMFMIINLPKKNLTVSTRYIEEKLQQGKLDEAFCKLTIQGIDKKENVLNQMVAILVAIIILIFTMFITWLMLQNDQEHLKRKYQIGAILGVKRKEGYLSVVKEISRDMWWSLLLAIGISGMFCGVFIKSYYYGTTEIVLIQKEVAMLGCILCIYVIIFMIFIIFSTRRLWKEISKIWGDKNMRNILEVKNLVRSYNTATFRDSKNNVNVLKGISFQVSKLSVQGITAAIQKGVVALEKMGKWIAAGGGAFLLVFILIAGIIAGAAFSSSSESSESLSAEVLAYTSVIQQYASQILERCIPVRINNRNIRQDNATANLKQAKKILLNNHAPNQNKATYYSHIHTLFSLYTLSLEQQDIMCNMCFLPSTGISARIFAKWLELPTLNEINDLIETGFVQTTTRRTISLHPMIQEITLSETKPSVTRCHILLDSLQHICLMHGMEVDYYKKLFQTIGNIIELIEKDDIPKYLLFLENAFPYMDNYNYHKGMNGIIQELKCLLKTKSIGTDSDRALLLDFQATLETKPEKAIKLEKDALAQIETITVDNARLVSNLHANLGGLYRMNGHPDLATIDQLGKIQPDTRNPVLASALETLGIIENRYSGIPTIRMEMEKYNLRQPEFLDCISQAGCSSPQDMDKLKLAWQGYNYGNGYIGWALQRGGYTEANALQFSQEQAAKDAQDIQDMLKDLLGETLQGMLEAEMDDHLGYSKYDYKNKETDDSRNGYSPKTNKTSNDNYYLLTLAAIAEEIKHRKAERKTEVILAVGLPLSSFGREKPGFREYLLRKEQPVRFLYESELYEITIKVWRKDSGRTAEKLVEKRLKKFLTNVDEYDNLNKLFQTAKTKNFDNGSYASGSLYGSVGKTWRTLVLTTGDSKQDIGVFESETAAPVSFSVQWLNMTRIELTKKDINTQNPLSGAVYGIYTDKKCENLLMTMSATGTDGKAVSDYFDSALKTVYVKEVTAPTGYTVSRYILFFSLMSFLSCFYFGIQFISTINAEKAESLYPYDFMCVADKSDDKLFEKIKEKYHATLTEYPMVRVANADKTEHLEGRGEIIIQGQQIGISESTYYKLKKAVDPSYKKKSLNLDKNGKKVYVVHQQDRATKAQPVDWYYNKKTPTLHIGLPCEYCDYADHETTYDKKIVAGEEISSLTGCYSTPKCENLIVFSDEYFKKAQNEWKDIEALTGFKLERYKAMYGDDGEPYIIEGPTKLVFIQTDKKYIDQIDKELESKEERHKYIGNYDSTVKFHYLSKTAITDMKTERAVKSMICVYIIITLSILNWIMLYAMNEMEKKEKAEREKFLVSMGMDRKERKKMNKREWYIYWIVPTIILIISTILFMRNTMTARMYPDDIRKICELQEAVVIAVWIVINGIYFWIMNRKARRGMTNNTEILRTEGLKRSYLVNETKIDVLKGINLTINNQEFIAIMGKSGSGKTTLLKLLGLLDRPTEGKVFFKGEDSNSLRGDRLAMIRRREIGFIYQDYYLMDSLSVRENIMLPKILDHSPVEESITEAEKLADIMGVRALLDKKIFELSGGEKQRAAICRALMNHSDLILADEPTGNLDSASSETVMEYLQMINKDLKKAVVLVTHDAYVASFCDRVIFVKDGNIEVELRKKEKQDVFCDKIMKAQKDILKNKMNDIGKTIIMVTHDLQMASYCSRLILLKDGVILEDLKNSGDQEAFYQEILRKMKELKDAQDIQDMLKDLLGETLQGMLEAEMYDHLGYSKYDYKNKETDDSRNGYSPKTMDVEMEKRKFLNLCGKRDRALLSGKKRMTLGDMERLTYLTEFFELENYGIALWGYIGWALQRGGYTEANALQFSQEQAASHGWSSYGDPEYVPHVMRYYSGGSLFSTIDQLGKIQPDTRNPVLASALETLGITENRYSGIPTIRMEMEKYNLRQPEFLDVLSAAERATSSGSTVTLTKGRTIYYPSYLGNYLTCLFTVNGKIAYCLQSQKASPPSGSYVAQVLDSNKNLQKVLYYGYGGAGDLTGSYLSGKSEDEKYVYTHIAASYAYAGEAGFTGCNYNDLVNAGIIAYINYLFGQEEPPKGELSFSSTKLNAVRDGNIQKTPNITLSGDHRNYVTLSVPENVTAHNLSKGTSVTNGKIQIYGGDTFYLSADLLLTGSYASGSLYGSVGKTWRTLVLTTGDSMKVRKLKTRIAAFGLAVLMGISTLSSANAFAAEQTDVGQEVQASEQVVTSQKDTTVTADDITKAVSDETFAVETSMEGLHYDAEKEDVTLISIQDENGGEYHPDKAGTYIASYMVVPKDKSDSYTITRKVTLTDTEGQAHSEENGGEKQKSDTESEDDSDSPVQNYTDVEIEASGEDASAQAVKELKEDIEEGNVTVLSAAERATSSGSTVTLTKGRTIYYPMEDRYYFAYGSNMNLEQMKYRCPAAEVVENVRLEDYRLAFRGRAPGNGVATVLPEKGSCVEGVLWKITEACEKSLDFYEGFPSFYGKESIRVKNQDGVEKEVFVYIMNAPHKDVPARPSKFYLDGILEGYKDNQIPTESVMEAVKRTRQEVKKEKNRYTRMTGITRQHAAEVVAEMFGTEAYYDGTTYGIWSVIDSEGKKWKFMSDGSIYTQRKVYGRIVDASGEYSTEMVSPKLSYDEMGKLQEVVRCLRQHGGFVNESCGQHVHVDASNHTPQSLKNALTIMYAKEDILFKALKVQERRANSYCQRVQPEVLEKIRKIPNRSITMDRVRNVWYGGRDRSHIHYDDTRYYALNLHAVFSKGTLEWRCFESTLHAGKVRANITLALAISAQAINQRSTQMKKTLISENPAFTFRTFLLRLGLIGDEYKNVRKHLLANLDGDLAWRYDKSTYECLKKNQRTEGVRMIGIKDQYFGTEIEMTGITRQRAAEVVAEMFGTEAYYDGTXXXXNDRDYQTTCCRSCCMRLQGYYDWQIDKIIDSTSDAQLYKQAGNGVTVNVIEAIGRLLQKADSELNAQEVSEKGIHMGGKTGLYDVGVPIKENTKLGYKLAREGDSIDLGYANLNSRRGRVGHQIAHTLTTGIQQGTLHFVDLSPPPLVTEECRSLNTRQCGIHKYKGECSGVLSEEGARAVLTPAKENVRQNGRRMKEPEEPMFTITATDRHGILYHGRIRRLVPRECLRLQGYYDWQIDKIIDSTSDXXXXSSWHLVSRQNKKVSSEGMFASAGLLRLADMISDVPEKYYLNQKQMEQLLFKSGQEVREKESTVQKDMVPQFRKRTEDGAXXXXXXXXXXXXXXXXXXXXXXXXXXXXXXXXXXXXXXXXXXXXXXXXXXXXXXNPGNFKKESSSCVSKSFSLSGDRECLARKSCTEMAEMKNICGKIPMDLHEKVREEIELTESSTQKFLQQVIEEHFNRLEGKGEISMGAVRTVAVQVSEELFQRLKVVIGQKHMKQKAFLIQIIEEALEKAEAEWQSKDQPEESEQTTGELGTEETQPEERTEPEGESEPDGESEPEGESEPEGESEPEGESEPEGESEPKEENEPEGESEPEEETEPERETDLEEETKAEEPTEWMTRPVYSFRPNLKNPEHQRAWEKFQRVPEGQKSQYLVQAILEKEDRKWLEEVIQKTIKESVRELGICGTTEQSTMKPSSEEIPDQMMDFLSQMENLAVPTVFMGGGSAILKRHVTAQDAICRPVFIEDVHANATGYERIVEQMWARILERCIPVRINNRNIRQDNATANLKQAKRILLNNHAPNQNAGVTYRKIKERKSRQEEAMVQGAESGKKLIKLKPEQAALAKENGKRQVKAAPRVVKVSGLSQEKIKTQASMQKQGIAVLIFLVLKTKIQAFLALIISTVVVGVIGGMPLTNITIEVDGVEKTFGIVNSITSGFGGTLGSIGIIIGFGVMMGQIFEVTGAAKRMAHTFLKLFGKKREEEALALTGFLVSIPIFCDSGFVVLAPIAKAISKATKKSVIGLGTALAAGLVITHSLVPPTPGPLGVCGIFGVDVGKFILLTLVLALPMAIACIAYSRLFLSKKYYRIPNDEGEIVEMPYQEPNYEAAFAMDMTGVPGALESFMPLIIPIILILINTVATAMGKTEGFMNILVFLGQPIVAVGLGLIVAILTLGRSLDRHEALAEMEKGMASAGIIMLVTGGGGALGQIIKDSGLGTFMAEGLAKTAIPIIILPLLIATAMRFIQGSGTVAMTTAASITAPIIAASGVSPILGAVACCVGSLFFGYFNDSYFWVVNRTLGVSEAKDQLTIWSVTSTVAWAVGVVEVLILNIFMILNTLTGMHFEDRNQFINSLNRYSLLIIDDLGIERNSDFALEQVFNVIDSRYRSKKPLIITTNLTLSELNNAADIAHKRIYDRILERCIPVRINNRNIRQDNATANLKQ
